(19) United States
(12) Patent Application Publication
(10) Pub. No.: US 2022/0378072 A1
(43) Pub. Date: Dec. 1, 2022

(54) BIOSYNTHESIS OF MOGROSIDES

(71) Applicant: Ginkgo Bioworks, Inc., Boston, MA (US)

(72) Inventors: Jeffrey Ian Boucher, (US); Matthew McMahon, (US); Scott Marr, (US); Jie Zhu, (US)

(73) Assignee: Ginkgo Bioworks, Inc., Boston, MA (US)

(21) Appl. No.: 17/771,146

(22) PCT Filed: Oct. 23, 2020
(86) PCT No.: PCT/US2020/057067

§ 371 Date: Apr. 22, 2022

Related U.S. Application Data
(60) Provisional application No. 62/926,170, filed on Oct. 25, 2019.

(51) Int. Cl. A23L 27/30; C07K 14/415; C12N 15/62; C12N 9/02; C12N 9/10; C12N 9/24; C12N 9/90

(52) U.S. Cl. CPC A23L 27/36; C07K 14/415; C12N 15/62; C12N 9/0042; C12N 9/0071; C12N 9/1051; C12N 9/24; C12N 9/90; C12Y 106/02004; C12Y 114/14; C12Y 303/02009; C12Y 504/99033; C07K 2319/02; C07K 2319/03

(57) ABSTRACT

The disclosure relates to enzymes, such as cucurbitadienol synthase (CDS), UDP-glycosyltransferase (UGT), C11 hydroxylase, epoxide hydrolase (EPH), squalene epoxidase (SQE), and/or cytochrome P450 reductase enzymes, recombinant host cells expressing the enzymes, and methods of producing mogrol precursors, mogrol, and/or mogrosides using such recombinant cells.

### CROSS-REFERENCE TO RELATED APPLICATIONS

[0001] This application claims the benefit under 35 U.S.C. § 119(e) of U.S. Provisional Application Ser. No. 62/926,170, filed Oct. 25, 2019, entitled “BIOSYNTHESIS OF MOGROSIDES,” the disclosure of which is incorporated by reference here in its entirety.

### REFERENCE TO A SEQUENCE LISTING SUBMITTED AS A TEXT FILE VIA EFS-WEB

[0002] The instant application contains a Sequence Listing which has been submitted in ASCII format via EFS-Web and is hereby incorporated by reference in its entirety. Said ASCII copy, created on Oct. 23, 2020, is named G091970038WO00-SEQ-FL and is 831 KB in size.

### FIELD OF THE INVENTION

[0003] The present disclosure relates to the production of mogrol precursors, mogrol and mogrosides in recombinant cells.

### BACKGROUND

[0004] Mogrosides are glycosides of cucurbitane derivatives. Highly sought after as sweeteners and sugar alternatives, mogrosides are naturally synthesized in the fruits of plants, including Siraitia grosvenorii (S. grosvenorii). Although anti-cancer, anti-oxidative, and anti-inflammatory properties have been ascribed to mogrosides, characterization of the exact enzymes involved in mogroside biosynthesis is limited. Furthermore, mogroside extraction from fruit is labor-intensive and the structural complexity of mogrosides often hinders de novo chemical synthesis.

### SUMMARY

[0005] Aspects of the present disclosure provide host cells that express a C11 hydroxylase fusion protein. In some embodiments, the C11 hydroxylase fusion protein comprises: (a) a signal sequence that comprises a sequence selected from SEQ ID NO: 226, SEQ ID NO: 220 or SEQ ID NOs: 209-219, 221-225, or 227-232 or a sequence that has no more than two amino acid substitutions, deletions, or insertions relative to a sequence selected from SEQ ID NO: 226, SEQ ID NO: 220 or SEQ ID NOs: 209-219, 221-225, or 227-232; and (b) a sequence comprising a transmembrane domain and a catalytic domain of a C11 hydroxylase enzyme.

[0006] In some embodiments, the signal sequence comprises a sequence selected from SEQ ID NO: 226, SEQ ID NO: 220 or SEQ ID NOs: 209-219, 221-225, or 227-232.

[0007] In some embodiments, the sequence in (b) comprises a sequence that is at least 90% identical to wild-type CYP5491 (SEQ ID NO: 208).

[0008] In some embodiments, the transmembrane domain of the C11 hydroxylase enzyme comprises residues that correspond to residues 2-28 of wild-type CYP5491 (SEQ ID NO: 208) and/or the catalytic domain of the C11 hydroxylase enzyme comprises residues that correspond to residues 29-473 of wild-type CYP5491 (SEQ ID NO: 208).

[0009] In some embodiments, the sequence comprising the catalytic domain of the C11 hydroxylase enzyme comprises an amino acid substitution, deletion, or insertion in the catalytic domain relative to the catalytic domain of wild-type CYP5491 (residues 29-473 of SEQ ID NO: 208).

[0010] In some embodiments, the amino acid substitution, deletion, or insertion is located in the substrate binding domain of the C11 hydroxylase enzyme.

[0011] In some embodiments, the amino acid substitution, deletion, or insertion is located in a loop that binds a heme group.

[0012] In some embodiments, relative to the sequence of wild-type CYP5491 (SEQ ID NO: 208), the C11 hydroxylase enzyme comprises an amino acid substitution at a residue corresponding to residues: S49; V57; L76; A85; D107; L109; F112; T117; W119; L120; A140; F147; S155; H160; K185; L210; S211; L212; A282; D299; V350; T351; A353; L354; M376; I458; and/or T470 in CYP5491.

[0013] In some embodiments, the C11 hydroxylase enzyme comprises: A, F, H, I, M, or L at the residue corresponding to S49 of wild-type CYP5491 (SEQ ID NO: 208); A at the residue corresponding to V57 of wild-type CYP5491 (SEQ ID NO: 208); I or V at the residue corresponding to L76 of wild-type CYP5491 (SEQ ID NO: 208); S at the residue corresponding to A85 of wild-type CYP5491 (SEQ ID NO: 208); P or R at the residue corresponding to D107 of wild-type CYP5491 (SEQ ID NO: 208); A, C, F, W, or Y at the residue corresponding to L109 of wild-type CYP5491 (SEQ ID NO: 208); T or W at the residue corresponding to F112 of wild-type CYP5491 (SEQ ID NO: 208); G at the residue corresponding to T117 of wild-type CYP5491 (SEQ ID NO: 208); R at the residue corresponding to W119 of wild-type CYP5491 (SEQ ID NO: 208); H or N at the residue corresponding to L120 of wild-type CYP5491 (SEQ ID NO: 208); P at the residue corresponding to A140 of wild-type CYP5491 (SEQ ID NO: 208); L at the residue corresponding to F147 of wild-type CYP5491 (SEQ ID NO: 208); A at the residue corresponding to S155 of wild-type CYP5491 (SEQ ID NO: 208); E at the residue corresponding to H160 of wild-type CYP5491 (SEQ ID NO: 208); H at the residue corresponding to K185 of wild-type CYP5491 (SEQ ID NO: 208); S at the residue corresponding to L210 of wild-type CYP5491 (SEQ ID NO: 208); N at the residue corresponding to S211 of wild-type CYP5491 (SEQ ID NO: 208); F at the residue corresponding to L212 of wild-type CYP5491 (SEQ ID NO: 208); V at the residue corresponding to A282 of wild-type CYP5491 (SEQ ID NO: 208); A at the residue corresponding to D299 of wild-type CYP5491 (SEQ ID NO: 208); F, I, L, or M at the residue corresponding to V350 of wild-type CYP5491 (SEQ ID NO: 208); L or M at the residue corresponding to T351 of wild-type CYP5491 (SEQ ID NO: 208); G at the residue corresponding to A353 of wild-type CYP5491 (SEQ ID NO: 208); V or I at the residue corresponding to L354 of wild-type CYP5491 (SEQ ID NO: 208); A or C at the residue corresponding to M376 of wild-type CYP5491 (SEQ ID NO: 208); P at the residue corresponding to I458 of wild-type CYP5491 (SEQ ID NO: 208); and/or E at the residue corresponding to T470 of wild-type CYP5491 (SEQ ID NO: 208).

[0014] In some embodiments, the host cell further comprises an upregulated squalene epoxidase (SQE), at least one cytochrome P450 reductase, at least one cucurbitadienol synthase (CDS), and/or at least one epoxide hydrolase (EPH).

[0015] In some embodiments, the host cell comprises an upregulated squalene synthase, a downregulated lanosterol synthase, at least one other C11 hydroxylase, and/or at least two cytochrome P450 reductases.

[0016] In some embodiments, a nucleotide sequence encoding the C11 hydroxylase fusion protein is integrated into the genome of the host cell. In some embodiments, a nucleotide sequence encoding the C11 hydroxylase fusion protein is expressed on a plasmid.

[0017] In some embodiments, multiple copies of a nucleotide sequence encoding the C11 hydroxylase fusion protein are integrated into the genome of the host cell.

[0018] In some embodiments, at least one nucleotide sequence encoding the squalene synthase, the squalene epoxidase, the at least one other C11 hydroxylase, the at least one cytochrome P450 reductase, the at least one CDS, and/or the at least one EPH is integrated into the genome of the host cell.

[0019] In some embodiments, the host cell produces mogrol.

[0020] In some embodiments, the host cell produces at least 1.1 fold more mogrol compared to a control host cell, wherein the control host cell comprises wild-type CYP5491.

[0021] In some embodiments, the host cell is capable of being cultured in cell culture media that is substantially free of one or more mogrol precursors that are not produced by the host cell.

[0022] In some embodiments, the host cell is capable of producing a ratio of mogrol/11-oxomogrol that is greater than 2.

[0023] In some embodiments, the C11 hydroxylase fusion protein comprises a sequence that is at least 90% identical to a sequence selected from SEQ ID NO: 305 or 308, SEQ ID NOs: 257-280, or SEQ ID NOs: 306-307, or SEQ ID NOs: 309-310.

[0024] Further aspects of the present disclosure provide host cells that comprise a C11 hydroxylase enzyme, wherein the C11 hydroxylase enzyme is at least 90% identical to wild-type CYP5491 (SEQ ID NO: 208) and comprises an amino acid substitution at one or more residues corresponding to residues in CYP5491. In some embodiments, the one or more residues correspond to residues: S49; V57; L76; A85; D107; L109; F112; T117; W119; L120; A140; F147; S155; H160; K185; L210; S211; L212; A282; D299; V350; T351; A353; L354; M376; I458; and/or T470 in CYP5491.

[0025] In some embodiments, the C11 hydroxylase enzyme comprises: A, F, H, I, M, or L at the residue corresponding to S49 of wild-type CYP5491 (SEQ ID NO: 208); A at the residue corresponding to V57 of wild-type CYP5491 (SEQ ID NO: 208); I or V at the residue corresponding to L76 of wild-type CYP5491 (SEQ ID NO: 208); S at the residue corresponding to A85 of wild-type CYP5491 (SEQ ID NO: 208); P or R at the residue corresponding to D107 of wild-type CYP5491 (SEQ ID NO: 208); A, C, F, W, or Y at the residue corresponding to L109 of wild-type CYP5491 (SEQ ID NO: 208); T or W at the residue corresponding to F112 of wild-type CYP5491 (SEQ ID NO: 208); G at the residue corresponding to T117 of wild-type CYP5491 (SEQ ID NO: 208); R at the residue corresponding to W119 of wild-type CYP5491 (SEQ ID NO: 208); H or N at the residue corresponding to L120 of wild-type CYP5491 (SEQ ID NO: 208); P at the residue corresponding to A140 of wild-type CYP5491 (SEQ ID NO: 208); L at the residue corresponding to F147 of wild-type CYP5491 (SEQ ID NO: 208); A at the residue corresponding to S155 of wild-type CYP5491 (SEQ ID NO: 208); E at the residue corresponding to H160 of wild-type CYP5491 (SEQ ID NO: 208); H at the residue corresponding to K185 of wild-type CYP5491 (SEQ ID NO: 208); S at the residue corresponding to L210 of wild-type CYP5491 (SEQ ID NO: 208); N at the residue corresponding to S211 of wild-type CYP5491 (SEQ ID NO: 208); F at the residue corresponding to L212 of wild-type CYP5491 (SEQ ID NO: 208); V at the residue corresponding to A282 of wild-type CYP5491 (SEQ ID NO: 208); A at the residue corresponding to D299 of wild-type CYP5491 (SEQ ID NO: 208); F, I, L, or M at the residue corresponding to V350 of wild-type CYP5491 (SEQ ID NO: 208); L or M at the residue corresponding to T351 of wild-type CYP5491 (SEQ ID NO: 208); G at the residue corresponding to A353 of wild-type CYP5491 (SEQ ID NO: 208); V or I at the residue corresponding to L354 of wild-type CYP5491 (SEQ ID NO: 208); A or C at the residue corresponding to M376 of wild-type CYP5491 (SEQ ID NO: 208); P at the residue corresponding to I458 of wild-type CYP5491 (SEQ ID NO: 208); and/or E at the residue corresponding to T470 of wild-type CYP5491 (SEQ ID NO: 208).

[0026] In some embodiments, the C11 hydroxylase enzyme comprises: (a) a phenylalanine (F) or leucine (L) at a residue corresponding to S49 in wild-type CYP5491 (SEQ ID NO: 208); and/or (b) a methionine (M) at a residue corresponding to T351 in wild-type CYP5491 (SEQ ID NO: 208).

[0027] In some embodiments, the C11 hydroxylase enzyme is expressed as a C11 hydroxylase fusion protein that comprises a signal sequence that is at least 90% identical to a sequence selected from SEQ ID NO: 226, SEQ ID NO: 220 or SEQ ID NOs: 209-219, 221-225, or 227-232.

[0028] In some embodiments, the signal sequence comprises a sequence selected from SEQ ID NO: 226, SEQ ID NO: 220 or SEQ ID NOs: 209-219, 221-225, or 227-232.

[0029] In some embodiments, the host cell further comprises an upregulated squalene epoxidase, at least one cytochrome P450 reductase, at least one cucurbitadienol synthase (CDS), and/or at least one epoxide hydrolase (EPH).

[0030] In some embodiments, the host cell comprises an upregulated squalene synthase, a downregulated lanosterol synthase, at least one other C11 hydroxylase, and/or at least two cytochrome P450 reductases.

[0031] In some embodiments, a nucleotide sequence encoding the C11 hydroxylase enzyme is integrated into the genome of the host cell or a nucleotide sequence encoding the C11 hydroxylase enzyme is expressed on a plasmid.

[0032] In some embodiments, multiple copies of a nucleotide sequence encoding the C11 hydroxylase enzyme are integrated into the genome of the host cell.

[0033] In some embodiments, at least one nucleotide sequence encoding the squalene synthase, the squalene epoxidase, the at least one other C11 hydroxylase, the at least one cytochrome P450 reductase, the at least one CDS, and/or the at least one EPH is integrated into the genome of the host cell.

[0034] In some embodiments, the host cell produces mogrol.

[0035] In some embodiments, the host cell produces 1.1 fold more mogrol compared to a control host cell, wherein the control host cell comprises wild-type CYP5491.

[0036] In some embodiments, the host cell is capable of being cultured in cell culture media that is substantially free of one or more mogrol precursors that are not produced by the host cell.

[0037] In some embodiments, the host cell is capable of producing a ratio of mogrol/11-oxomogrol that is greater than 2.

[0038] Further aspects of the present disclosure provide methods of producing mogrol. In some embodiments, the methods comprise culturing any of the host cells disclosed.

[0039] In some embodiments, the host cell is cultured in the presence of a mogrol precursor selected from squalene, 2-3-oxidosqualene, cucurbitadienol, 2-3, 22,23-diepoxysqualene, 24, 25 epoxy-cucurbitadienol, and 24, 25 dihydroxy cucurbitadienol.

[0040] In some embodiments, the host cell is cultured in media that is substantially free of one or more mogrol precursors that are not produced by the host cell.

[0041] Further aspects of the present disclosure provide host cells that comprise a C11 hydroxylase fusion protein, wherein the C11 hydroxylase fusion protein comprises the signal sequence of ERG11 and a sequence encoding a transmembrane domain and a catalytic domain of a C11 hydroxylase enzyme.

[0042] In some embodiments, the C11 hydroxylase fusion protein comprises residues 3-504 of wild-type CYP5491 (SEQ ID NO: 208).

[0043] In some embodiments, the C11 hydroxylase fusion protein comprises a sequence that is at least 90% identical to SEQ ID NO: 280.

[0044] Further aspects of the present disclosure provide C11 hydroxylase fusion proteins, wherein the fusion protein comprises: (a) a signal sequence that is at least 90% identical to a sequence selected from SEQ ID NO: 226, SEQ ID NO: 220 or SEQ ID NOs: 209-219, 221-225, or 227-232, and a sequence encoding a transmembrane domain and a catalytic domain of a C11 hydroxylase enzyme; or (b) the first 25 amino acids of ERG11, and a sequence encoding a transmembrane domain and a catalytic domain of a C11 hydroxylase enzyme.

[0045] Further aspects of the present disclosure provide methods of producing mogrol comprising contacting a C11 hydroxylase enzyme with (a) 24, 25 dihydroxy cucurbitadienol, thereby producing mogrol; (b) cucurbitadienol, thereby producing 11-hydroxycucurbitadienol; and/or (c) 24,25-epoxy cucurbitadienol, thereby producing, 11-hydroxy-24,25-epoxycucurbitadienol, wherein the C11 hydroxylase enzyme is at least 90% identical to SEQ ID NO: 208 and comprises at least one amino acid substitution relative to SEQ ID NO: 208.

[0046] In some embodiments, relative to the sequence of wild-type CYP5491 (SEQ ID NO: 208), the C11 hydroxylase enzyme comprises an amino acid substitution at a residue corresponding to residues: S49; V57; L76; A85; D107; L109; F112; T117; W119; L120; A140; F147; S155; H160; K185; L210; S211; L212; A282; D299; V350; T351; A353; L354; M376; I458; and/or T470 in wild-type CYP5491 (SEQ ID NO: 208).

[0047] In some embodiments, the C11 hydroxylase enzyme comprises: A, F, H, I, M, or L at the residue corresponding to S49 in wild-type CYP5491 (SEQ ID NO: 208); A at the residue corresponding to V57 in wild-type CYP5491 (SEQ ID NO: 208); I or V at the residue corresponding to L76 in wild-type CYP5491 (SEQ ID NO: 208); S at the residue corresponding to A85 in wild-type CYP5491 (SEQ ID NO: 208); P or R at the residue corresponding to D107 in wild-type CYP5491 (SEQ ID NO: 208); A, C, F, W, or Y at the residue corresponding to L109 in wild-type CYP5491 (SEQ ID NO: 208); T or W at the residue corresponding to F112 in wild-type CYP5491 (SEQ ID NO: 208); G at the residue corresponding to T117 in wild-type CYP5491 (SEQ ID NO: 208); Rat the residue corresponding to W119 in wild-type CYP5491 (SEQ ID NO: 208); H or N at the residue corresponding to L120 in wild-type CYP5491 (SEQ ID NO: 208); P at the residue corresponding to A140 in wild-type CYP5491 (SEQ ID NO: 208); L at the residue corresponding to F147 in wild-type CYP5491 (SEQ ID NO: 208); A at the residue corresponding to S155 in wild-type CYP5491 (SEQ ID NO: 208); E at the residue corresponding to H160 in wild-type CYP5491 (SEQ ID NO: 208); H at the residue corresponding to K185 in wild-type CYP5491 (SEQ ID NO: 208); S at the residue corresponding to L210 in wild-type CYP5491 (SEQ ID NO: 208); N at the residue corresponding to S211 in wild-type CYP5491 (SEQ ID NO: 208); F at the residue corresponding to L212 in wild-type CYP5491 (SEQ ID NO: 208); V at the residue corresponding to A282 in wild-type CYP5491 (SEQ ID NO: 208); A at the residue corresponding to D299 in wild-type CYP5491 (SEQ ID NO: 208); F, I, L, or M at the residue corresponding to V350 in wild-type CYP5491 (SEQ ID NO: 208); L or M at the residue corresponding to T351 in wild-type CYP5491 (SEQ ID NO: 208); G at the residue corresponding to A353 in wild-type CYP5491 (SEQ ID NO: 208); V or I at the residue corresponding to L354 in wild-type CYP5491 (SEQ ID NO: 208); A or C at the residue corresponding to M376 in wild-type CYP5491 (SEQ ID NO: 208); P at the residue corresponding to I458 in wild-type CYP5491 (SEQ ID NO: 208); and/or E at the residue corresponding to T470 in wild-type CYP5491 (SEQ ID NO: 208).

[0048] In some embodiments, the C11 hydroxylase enzyme is a purified protein.

[0049] Further aspects of the disclosure provide host cells that comprise a C11 hydroxylase fusion protein, wherein the C11 hydroxylase fusion protein comprises: the signal sequence of KAR2, NCP1, ERP2, RBD2, SNA3, SPC2, NHX1, PGA2, GRX6, YLR413W, YJL062W, MSC2, EMCS, CHO2, IFA38, SUR2, IPT1, YET3, YPL162C, ERG11, SRP102, GUP1, CBR1, or YHR138C; and a sequence encoding a transmembrane domain and a catalytic domain of a C11 hydroxylase enzyme.

[0050] Further aspects of the disclosure provide host cells comprising a C11 hydroxylase fusion protein, wherein the C11 hydroxylase fusion protein is at least 90% identical to any one of SEQ ID NO: 305 or 308, SEQ ID NOs: 257-280, or SEQ ID NOs: 306-307, or SEQ ID NOs: 309-310. In some embodiments, the C11 hydroxylase fusion protein is at least 98% identical to any one of SEQ ID NO: 305 or 308, SEQ ID NOs: 257-280, or SEQ ID NOs: 306-307, or SEQ ID NOs: 309-310. In some embodiments, the C11 hydroxylase fusion protein is at least 99% identical to any one of SEQ ID NO: 305 or 308, SEQ ID NOs: 257-280, or SEQ ID NOs: 306-307, or SEQ ID NOs: 309-310.

[0051] In some embodiments, the C11 hydroxylase comprises any one of SEQ ID NO: 305 or 308, SEQ ID NOs: 257-280, or SEQ ID NOs: 306-307, or SEQ ID NOs: 309-310. In some embodiments, the C11 hydroxylase is PGA2Id23-129_CYP5491-T351M (SEQ ID NO: 305).

[0052] Further aspects of the disclosure provide methods comprising culturing any of the host cells disclosed.

[0053] Each of the limitations of the invention can encompass various embodiments of the invention. It is, therefore, anticipated that each of the limitations of the invention involving any one element or combinations of elements can be included in each aspect of the invention. This invention is not limited in its application to the details of construction and the arrangement of components set forth in the following description or illustrated in the drawings. The invention is capable of other embodiments and of being practiced or of being carried out in various ways. Also, the phraseology and terminology used in this disclosure is for the purpose of description and should not be regarded as limiting. The use of “including,” “comprising,” or “having,” “containing,” “involving,” and variations thereof, is meant to encompass the items listed thereafter and equivalents thereof as well as additional items.

### BRIEF DESCRIPTION OF DRAWINGS

[0054] The accompanying drawings are not intended to be drawn to scale. The drawings are illustrative only and are not required for enablement of the disclosure. For purposes of clarity, not every component may be labeled in every drawing. In the drawings:

[0055] FIGS. 1A-1B are schematic overviews of putative mogrol biosynthesis pathways. SQS indicates squalene synthase, EPD indicates Epoxidase, P450 indicates C11 hydroxylase, EPH indicates epoxide hydrolase, and CDS indicates cucurbitadienol synthase.

[0056] FIGS. 2A-2C depict schematics showing: the generalized structure of a C11 hydroxylase; development of a C11 hydroxylase fusion protein library based on the C11 hydroxylase CYP5491; and design of the C11 hydroxylase library plasmid. FIG. 2A depicts the structure of a C11 hydroxylase. FIG. 2B is a schematic showing development of a C11 hydroxylase fusion protein library. FIG. 2C is a schematic showing the P450 library plasmid structure.

[0057] FIG. 3 depicts the development of a host cell for screening CYP5491 fusion proteins and CYP5491 mutants. FIG. 3 shows that integration of multiple copies of wild-type CYP5491 into the genome of the screening strain promotes mogrol production, with one transformant, P450 Base strain-3, of the strain showing a higher titer than the rest.

[0058] FIGS. 4A-4B depict diagrams showing residues in the active site of CYP5491 that are in close proximity to a modeled lanosterol and that were subjected to saturation mutagenesis and screening.

[0059] FIGS. 5A-5B depict graphs showing the production of mogrol by host cells encoding a member of the C11 hydroxylase screening library relative to mogrol production of control host cells encoding wild-type CYP5491. FIG. 5A shows the results for all members of the screening library as compared to the control strain (t401172) that encodes multiple copies of wild-type CYP5491. FIG. 5B is a magnification of a portion of the graph depicted in FIG. 5A.

[0060] FIG. 6 is a graph showing results of mogrol production from a secondary validation screen of 71 hits from the C11 hydroxylase screening library. The results from the primary screen are also shown for comparison. The y-axis shows fold improvement in mogrol production relative to the control host cells encoding multiple copies of wild-type CYP5491.

[0061] FIG. 7 depicts a graph showing fold improvement of mogrol production with host cells comprising the indicated CYP5491 mutants, signal peptide-wild-type CYP5491 fusion proteins, and signal peptide-CYP5491 mutant fusion proteins compared to wild-type CYP5491 (SEQ ID NO: 208) (shown left-most).

[0062] FIG. 8 depicts a graph showing the mean mogrol production (mg/L), mean oxomogrol production (mg/L), and mean mogrol/oxo mogrol ratios of host cells comprising the indicated wild-type CYP5491, CYP5491 mutants, signal peptide-wild-type CYP5491 fusion proteins, and signal peptide-CYP5491 mutant fusion proteins. Results for a control strain are also shown.

### DETAILED DESCRIPTION

[0063] Mogrosides are widely used as natural sweeteners, for example in beverages. However, de novo synthesis and mogroside extraction from natural sources often involves high production costs and low yield. This application describes recombinant host cells that are engineered to efficiently produce mogrol (or 11, 24, 25-trihydroxy cucurbitadienol), mogrosides, and precursors thereof. Methods include heterologous expression of cucurbitadienol synthase (CDS) enzymes, UDP-glycosyltransferase (UGT) enzymes, C11 hydroxylase enzymes, cytochrome P450 reductase enzymes, epoxide hydrolase (EPH) enzymes, squalene epoxidase (SQE) enzymes, or combinations thereof. This application describes the identification of improved C11 hydroxylases for mogrol production. Examples 1-2 describe screening of C11 hydroxylases, including variants and fusion proteins, resulting in identification of C11 hydroxylases with improved mogrol production relative to wild-type C11 hydroxylase CYP5491. Enzymes and recombinant host cells described in this application can be used for making mogrol, mogrosides, and precursors thereof.

### Synthesis of Mogrol and Mogrosides

[0064] FIGS. 1A-1B show a putative mogrol synthesis pathway. An early step in the pathway involves conversion of squalene to 2,3-oxidoqualene. As shown in FIG. 1A, 2,3-oxidosqualene is first cyclized to cucurbitadienol followed by epoxidation to form 24,25-epoxycucurbitadienol, or 2,3-oxidosqualene is epoxidized to 2,3,22,23-dioxidosqualene and then cyclized to 24,25-epoxycucurbitadienol. Next, the 24,25-epoxycucurbitadienol can be converted to mogrol (aglycone of mogrosides) following epoxide hydrolysis and then oxidation, or oxidation and then epoxide hydrolysis. As shown in FIG. 1B, 2,3-oxidosqualene is first cyclized to cucurbitadienol, which is then converted to 11-hydroxycucurbitadienol by a cytochrome P450 C11 hydroxylase. Then, a cytochrome P450 C11 hydroxylase may convert 11-hydroxycucurbitadienol to 11-hydroxy-24,25-epoxycucurbitadienol. 11-hydroxy-24,25-epoxycucurbitadienol may be converted to mogrol by epoxide hydrolase. C11 hydroxylases act in conjunction with cytochrome P450 reductases (not shown in FIGS. 1A-1B).

[0065] Mogrol can be distinguished from other cucurbitane triterpenoids by oxygenations at C3, C11, C24, and C25. Glycosylation of mogrol, for example at C3 and/or C24 leads to the formation of mogrosides.

[0066] Mogrol precursors include but are not limited to squalene, 2-3-oxidosqualene, 2,3,22,23-dioxidosqualene, cucurbitadienol, 24, 25-expoxycucurbitadienol, 11-hydroxycucurbitadienol, 11-hydroxy-24,25-epoxycucurbitadienol, 11-hydroxy-cucurbitadienol, 11-oxo-cucurbitadienol, and 24,25-dihydroxycucurbitadienol. The term “dioxidosqualene” may be used to refer to 2,3,22,23-diepoxy squalene or 2,3,22,23-dioxido squalene. The term “2,3-epoxysqualene” may be used interchangeably with the term “2-3-oxidosqualene.” As used in this application, mogroside precursors include mogrol precursors, mogrol and mogrosides.

[0067] Examples of mogrosides include, but are not limited to, mogroside I-A1 (MIA1), mogroside IE (MIE), mogroside II-A1 (MIIA1), mogroside II-A2 (MIIA2), mogroside III-A1 (MIIIA1), mogroside II-E (MIIE), mogroside III (MIIIE), siamenoside I, mogroside IV, mogroside IVa, isomogroside IV, mogroside III-E (MIIIE), mogroside V, and mogroside VI.

[0068] In some embodiments, the mogroside produced is siamenoside I, which may be referred to as Siam. In some embodiments, the mogroside produced is MIIIE.

[0069] In other embodiments, a mogroside is a compound of Formula 1:

[chemical structure]

[0070] In some embodiments, the methods described in this application may be used to produce any of the compounds described in and incorporated by reference from US 2019/0071705, including compounds 1-20 as disclosed in US 2019/0071705. In some embodiments, the methods described in this application may be used to produce variants of any of the compounds described in and incorporated by reference from US 2019/0071705, including variants of compounds 1-20 as disclosed in US 2019/0071705. For example, a variant of a compound described in US 2019/0071705 can comprise a substitution of one or more alpha-glucosyl linkages in a compound described in US 2019/0071705 with one or more beta-glucosyl linkages. In some embodiments, a variant of a compound described in US 2019/0071705 comprises a substitution of one or more beta-glucosyl linkages in a compound described in US 2019/0071705 with one or more alpha-glucosyl linkages. In some embodiments, a variant of a compound described in US 2019/0071705 is a compound of Formula 1 show above.

C11 hydroxylase Enzymes

[0071] Aspects of the disclosure provide C11 hydroxylases, which may be useful, for example, in the production of mogrol. C11 hydroxylases are a type of P450 enzyme. As used in this disclosure, a C11 hydroxylase refers to an enzyme that is capable of introducing a hydroxyl group into the C11 position of a compound. In some embodiments, the compound is a mogrol precursor. In some embodiments, the compound is a mogroside. In some embodiments, a C11 hydroxylase is also capable of introducing a hydroxyl group into a position that is not C11 on a compound. In some embodiments, a C11 hydroxylase is a C11 hydroxylase that is capable of catalyzing C11 hydroxylation of a mogrol precursor. In some embodiments, the mogrol precursor is 24,25-epoxycucurbitadienol or 24,25-dihydroxycucurbitadienol. In some embodiments, a C11 hydroxylase is capable of producing 11-hydroxy-24,25-epoxycucurbitadienol. In some embodiments, a C11 hydroxylase is capable of producing mogrol. In some embodiments, a C11 hydroxylase is capable of producing 11-oxo mogrol. In some embodiments, a mogrol precursor is 11-hydroxy-cucurbitadienol. In some embodiments, a mogrol precursor is 11-oxo-cucurbitadienol. In some embodiments, a C11 hydroxylase uses cucurbitadienol as a substrate to produce 11-hydroxy-cucurbitadienol. In some embodiments, a C11 hydroxylase uses 11-hydroxy-cucurbitadienol as a substrate to produce 11-oxo cucurbitadienol. In some embodiments, a C11 hydroxylase uses cucurbitadienol as a substrate to produce 11-hydroxy-cucurbitadienol and then converts 11-hydroxy-cucurbitadienol to 11-oxo cucurbitadienol. Structurally, C11 hydroxylases generally comprise a transmembrane domain and a catalytic domain, as shown in FIG. 2A. As used in this application, a “transmembrane domain” refers to a domain encompassing the membrane-spanning region of a protein. As used in this application, a “catalytic domain” refers to a region of an enzyme comprising the active site. In some embodiments, the catalytic domain of a C11 hydroxylase can bind heme. In some embodiments, a C11 hydroxylase is localized to the endoplasmic reticulum (ER).

[0072] An example of a C11 hydroxylase is CYP5491. A non-limiting example of a nucleotide sequence encoding wild-type CYP5491 is:

(SEQ ID NO: 207)
ATGTGGACTGTCGTGCTCGGTTTGGCGACGCTGTTTGTCGCCTACTACAT
CCATTGGATTAACAAATGGAGAGATTCCAAGTTCAACGGAGTTCTGCCGC
CGGGCACCATGGGTTTGCCGCTCATCGGAGAAACGATTCAACTGAGTCGA
CCCAGTGACTCCCTCGACGTTCACCCTTTCATCCAGAAAAAAGTTGAAAG
ATACGGGCCGATCTTCAAAACATGTCTGGCCGGAAGGCCGGTGGTGGTGT
CGGCGGACGCAGAGTTCAACAACTACATAATGCTGCAGGAAGGAAGAGCA
GTGGAAATGTGGTATTTGGATACGCTCTCCAAATTTTTCGGCCTCGACAC
CGAGTGGCTCAAAGCTCTGGGCCTCATCCACAAGTACATCAGAAGCATTA
CTCTCAATCACTTCGGCGCCGAGGCCCTGCGGGAGAGATTTCTTCCTTTT
ATTGAAGCATCCTCCATGGAAGCCCTTCACTCCTGGTCTACTCAACCTAG
CGTCGAAGTCAAAAATGCCTCCGCTCTCATGGTTTTTAGGACCTCGGTGA
ATAAGATGTTCGGTGAGGATGCGAAGAAGCTATCGGGAAATATCCCTGGG
AAGTTCACGAAGCTTCTAGGAGGATTTCTCAGTTTACCACTGAATTTTCC
CGGCACCACCTACCACAAATGCTTGAAGGATATGAAGGAAATCCAGAAGA
AGCTAAGAGAGGTTGTAGACGATAGATTGGCTAATGTGGGCCCTGATGTG
GAAGATTTCTTGGGGCAAGCCCTTAAAGATAAGGAATCAGAGAAGTTCAT
TTCAGAGGAGTTCATCATCCAACTGTTGTTTTCTATCAGTTTTGCTAGCT
TTGAGTCCATCTCCACCACTCTTACTTTGATTCTCAAGCTCCTTGATGAA
CACCCAGAAGTAGTGAAAGAGTTGGAAGCTGAACACGAGGCGATTCGAAA
AGCTAGAGCAGATCCAGATGGACCAATTACTTGGGAAGAATACAAATCCA
TGACTTTTACATTACAAGTCATCAATGAAACCCTAAGGTTGGGGAGTGTC
ACACCTGCCTTGTTGAGGAAAACAGTTAAAGATCTTCAAGTAAAAGGATA
CATAATCCCGGAAGGATGGACAATAATGCTTGTCACCGCTTCACGTCACA
GAGATCCAAAAGTCTATAAGGACCCTCATATCTTCAATCCATGGCGTTGG
AAGGACTTGGACTCAATTACCATCCAAAAGAACTTCATGCCTTTTGGGGG
AGGCTTAAGGCATTGTGCTGGTGCTGAGTACTCTAAAGTCTACTTGTGCA
CCTTCTTGCACATCCTCTGTACCAAATACCGATGGACCAAACTTGGGGGA
GGAAGGATTGCAAGAGCTCATATATTGAGTTTTGAAGATGGGTTACATGT
GAAGTTCACGCCAAAAGAATAA

[0073] The amino acid sequence of wild-type CYP5491 is:

(SEQ ID NO: 208)
MWTVVLGLATLFVAYYIHWINKWRDSKFNGVLPPGTMGLPLIGETIQLSR
PSDSLDVHPFIQKKVERYGPIFKTCLAGRPVVVSADAEFNNYIMLQEGRA
VEMWYLDTLSKFFGLDTEWLKALGLIHKYIRSITLNHFGAEALRERFLPF
IEASSMEALHSWSTQPSVEVKNASALMVFRTSVNKMFGEDAKKLSGNIPG
KFTKLLGGFLSLPLNFPGTTYHKCLKDMKEIQKKLREVVDDRLANVGPDV
EDFLGQALKDKESEKFISEEFIIQLLFSISFASFESISTTLTLILKLLDE
HPEVVKELEAEHEAIRKARADPDGPITWEEYKSMTFTLQVINETLRLGSV
TPALLRKTVKDLQVKGYIIPEGWTIMLVTASRHRDPKVYKDPHIFNPWRW
KDLDSITIQKNFMPFGGGLRHCAGAEYSKVYLCTFLHILCTKYRWTKLGG
GRIARAHILSFEDGLHVKFTPKE

[0074] In SEQ ID NO: 208 depicted above, underlined residues 2-28 correspond to the transmembrane domain of wild-type CYP5491. Residues 29-473, shown in bold, correspond to the catalytic domain of CYP5491.

[0075] One of ordinary skill in the art would be able to identify the transmembrane domain and/or catalytic domain of another C11 hydroxylase by using the wild-type CYP5491 amino acid sequence as a reference sequence. For example, one of ordinary skill in the art could identify the transmembrane domain and/or catalytic domain of another C11 hydroxylase by aligning the sequence of the C11 hydroxylase with the sequence of wild-type CYP5491 and identifying the residues in the C11 hydroxylase that correspond to the relevant domain in the wild-type CYP5491 sequence.

[0076] In some embodiments, a C11 hydroxylase is CYP5491. CYP5491 may have a mutation at 1, 2, 3, 4, 5, 6, 7, 8, 9, 10, 11, 12, 13, 14, 15, 16, 17, 18, 19, 20, 21, 22, 23, 24, 25, 26, 27, 28, 29, 30, 31, 32, 33, 34, 35, 36, 37, 38, 39, 40, 41, 42, 43, 44, 45, 46, 47, 48, 49, 50, 51, 52, 53, 54, 55, 56, 57, 58, 59, 60, 61, 62, 63, 64, 65, 66, 67, 68, 69, 70, 71, 72, 73, 74, 75, 76, 77, 78, 79, 80, 81, 82, 83, 84, 85, 86, 87, 88, 89, 90, 91, 92, 93, 94, 95, 96, 97, 98, 99, 100 or more than 100 residues relative to wild-type CYP5491 (SEQ ID NO: 208). In some embodiments, the mutation is an amino acid substitution. In some embodiments, the mutation is located in one or more residues selected from residues: 48, 49, 57, 76, 103-107, 109, 110, 112, 113, 118-120, 209-212, 215, 277, 278, 281, 282, 285, 286, 350-355, 376, and/or 457-459 of CYP5491, as depicted in FIGS. 4A-4B.

[0077] In some embodiments, one or more mutations are located in a region corresponding to the substrate binding domain of a C11 hydroxylase. In some instances, one or more mutations are located in a structural loop in a C11 hydroxylase that binds a heme group. The loop that binds a heme group may comprise amino acid residues corresponding to residues 350-355 in SEQ ID NO: 208. In some instances, one or more residues corresponding to residues 281, 282, 285, 286, and 350-355 in SEQ ID NO: 208 are mutated. In some instances, the mutation is an amino acid substitution. In some instances, the mutation is a deletion. In some instances, the mutation is an insertion.

[0078] In some embodiments, a sequence encoding a C11 hydroxylase enzyme comprises an amino acid substitution at a residue corresponding to S49; V57; L76; A85; D107; L109; F112; T117; W119; L120; A140; F147; S155; H160; K185; L210; S211; L212; A282; D299; V350; T351; A353; L354; M376; I458; and/or T470 in wild-type CYP5491 (SEQ ID NO: 208). In some embodiments, a sequence encoding a C11 hydroxylase enzyme comprises: A, F, H, I, M, or L at the residue corresponding to S49 in wild-type CYP5491 (SEQ ID NO: 208); A at the residue corresponding to V57 in wild-type CYP5491 (SEQ ID NO: 208); I or V at the residue corresponding to L76 in wild-type CYP5491 (SEQ ID NO: 208); S at the residue corresponding to A85 in wild-type CYP5491 (SEQ ID NO: 208); P or R at the residue corresponding to D107 in wild-type CYP5491 (SEQ ID NO: 208); A, C, F, W, or Y at the residue corresponding to L109 in wild-type CYP5491 (SEQ ID NO: 208); T or W at the residue corresponding to F112 in wild-type CYP5491 (SEQ ID NO: 208); G at the residue corresponding to T117 in wild-type CYP5491 (SEQ ID NO: 208); R at the residue corresponding to W119 in wild-type CYP5491 (SEQ ID NO: 208); H or N at the residue corresponding to L120 in wild-type CYP5491 (SEQ ID NO: 208); P at the residue corresponding to A140 in wild-type CYP5491 (SEQ ID NO: 208); L at the residue corresponding to F147 in wild-type CYP5491 (SEQ ID NO: 208); A at the residue corresponding to S155 in wild-type CYP5491 (SEQ ID NO: 208); E at the residue corresponding to H160 in wild-type CYP5491 (SEQ ID NO: 208); H at the residue corresponding to K185 in wild-type CYP5491 (SEQ ID NO: 208); S at the residue corresponding to L210 in wild-type CYP5491 (SEQ ID NO: 208); N at the residue corresponding to S211 in wild-type CYP5491 (SEQ ID NO: 208); F at the residue corresponding to L212 in wild-type CYP5491 (SEQ ID NO: 208); V at the residue corresponding to A282 in wild-type CYP5491 (SEQ ID NO: 208); A at the residue corresponding to D299 in wild-type CYP5491 (SEQ ID NO: 208); F, I, L, or M at the residue corresponding to V350 in wild-type CYP5491 (SEQ ID NO: 208); L or M at the residue corresponding to T351 in wild-type CYP5491 (SEQ ID NO: 208); G at the residue corresponding to A353 in wild-type CYP5491 (SEQ ID NO: 208); V or I at the residue corresponding to L354 in wild-type CYP5491 (SEQ ID NO: 208); A or C at the residue corresponding to M376 in wild-type CYP5491 (SEQ ID NO: 208); P at the residue corresponding to I458 in wild-type CYP5491 (SEQ ID NO: 208); and/or E at the residue corresponding to T470 in wild-type CYP5491 (SEQ ID NO: 208).

[0079] Membrane insertion of C11 hydroxylases can be directed by an internal uncleaved signal anchor sequence located near the N terminus. Generally, C11 hydroxylases have an Nₗᵤₘᵢₙₐₗ−C_{cytosol} orientation in the ER membrane, whereby the signal-anchor sequence inserts into the ER membrane with its N-terminus facing to the lumen. The topology of C11 hydroxylases can be determined by both internal hydrophobic signal-anchor sequences and the flanking hydrophilic residues. Without being bound by any particular theory, the internal hydrophobic signal-anchor sequence (transmembrane domain) can function as an ER signal sequence, a stop-transfer sequence, and/or a membrane-anchor sequence. The membrane orientation of a C11 hydroxylase may result, at least in part, from the hydrophilic amino acids flanking the internal signal-anchor sequences. In some instances, the flanking segment that carries the greatest net positive charge remains on the cytosolic face of the membrane. The membrane orientation of proteins with internal signal-anchor sequences may also be influenced, at least in part, by the length and amino acid composition of the internal hydrophobic segment. For example, in some instances, proteins with long hydrophobic segments (>20 residues) tend to adopt a Nₗᵤₘᵢₙₐₗ−C_{cytosol} orientation, while the opposite orientation is preferred in some instances by proteins with short hydrophobic segments.

[0080] Without being bound by any particular theory, the N-terminus of plant C11 hydroxylases in some instances may be involved in directing the correct anchoring of the nascent polypeptides. In other host cells, including S. cerevisiae, however, in some instances, the N-terminus of plant C11 hydroxylases may not be sufficient to target the C11 hydroxylase to the ER.

[0081] As disclosed in this application, the activity of heterologous C11 hydroxylases in host cells, including yeast cells, may be improved by replacing the native N-terminal sequence with sequences from other C11 hydroxylases or ER-membrane bound proteins to facilitate correct folding and anchoring.

[0082] In some embodiments, a C11 hydroxylase of the present disclosure is a “C11 hydroxylase fusion.” The phrase “C11 hydroxylase fusion” is used interchangeably in this application with the phrase “C11 hydroxylase fusion protein” and refers to a C11 hydroxylase, or a portion thereof, that is fused to another sequence. Non-limiting configurations of C11 hydroxylase fusions are depicted in FIG. 2B. For example, an N-terminal region of an ER membrane protein that may or may not be endogenously expressed in a host cell may be fused to a portion of a C11 hydroxylase protein of interest. In some embodiments, a region comprising the amino acid residues that are N-terminal to the transmembrane domain of an ER membrane protein is fused to a transmembrane domain and/or a C-terminal domain of a C11 hydroxylase protein. In some embodiments, a region comprising the amino acid residues that are N-terminal to the transmembrane domain, and the transmembrane domain, of an ER membrane protein is fused to a catalytic domain of a C11 hydroxylase protein of interest. It should be understood that the terms “transmembrane domain” and “catalytic domain” in the context of a fusion protein may refer to the entire transmembrane domain or catalytic domain of a reference protein or to a portion or fragment of the transmembrane domain or catalytic domain of a reference protein.

[0083] In some embodiments, a C11 hydroxylase fusion protein comprises a portion of a C11 hydroxylase protein and a signal peptide from another protein or a synthetic signal peptide. In some embodiments, a C11 hydroxylase fusion protein comprises residues 2-28 of wild-type CYP5491 (SEQ ID NO: 208). In some embodiments, a C11 hydroxylase fusion protein comprises residues 3-28 of wild-type CYP5491 (SEQ ID NO: 208). In some embodiments, a C11 hydroxylase fusion protein comprises residues 29-473 of wild-type CYP5491 (SEQ ID NO: 208). In some embodiments, a C11 hydroxylase fusion protein comprises residues 2-473 of wild-type CYP5491 (SEQ ID NO: 208). In some embodiments, a C11 hydroxylase fusion protein comprises residues 3-473 of wild-type CYP5491 (SEQ ID NO: 208).

[0084] In some embodiments, a C11 hydroxylase fusion protein comprises a sequence corresponding to residues 2-28 of wild-type CYP5491 (SEQ ID NO: 208) but includes at least one mutation at an amino acid corresponding to residues 2-28 of wild-type CYP5491 (SEQ ID NO: 208). In some embodiments, a C11 hydroxylase fusion protein comprises residues 3-28 of wild-type CYP5491 (SEQ ID NO: 208) but includes at least one mutation at an amino acid corresponding to residues 3-28 of wild-type CYP5491 (SEQ ID NO: 208). In some embodiments, a C11 hydroxylase fusion protein comprises a sequence corresponding to residues 29-473 of wild-type CYP5491 (SEQ ID NO: 208) but includes at least one mutation at an amino acid corresponding to residues 29-473 of wild-type CYP5491 (SEQ ID NO: 208). In some embodiments, a C11 hydroxylase fusion protein comprises a sequence corresponding to residues 2-473 of wild-type CYP5491 (SEQ ID NO: 208) but includes at least one mutation at an amino acid corresponding to residues 29-473 of wild-type CYP5491 (SEQ ID NO: 208). In some embodiments, a C11 hydroxylase fusion protein comprises a sequence corresponding to residues 3-473 of wild-type CYP5491 (SEQ ID NO: 208) but includes at least one mutation at an amino acid corresponding to residues 29-473 of wild-type CYP5491 (SEQ ID NO: 208). In some embodiments, a C11 hydroxylase fusion comprises a sequence corresponding to residues 29-473 of wild-type CYP5491 and includes one mutation at an amino acid corresponding to residues 29-473 of wild-type CYP5491 (SEQ ID NO: 208). In some embodiments, the mutation is an amino acid substitution, deletion, or insertion.

[0085] In some instances, a C11 hydroxylase fusion comprises a sequence with a mutation at 1, 2, 3, 4, 5, 6, 7, 8, 9, 10, 11, 12, 13, 14, 15, 16, 17, 18, 19, 20, 21, 22, 23, 24, 25, 26, 27, 28, 29, 30, 31, 32, 33, 34, 35, 36, 37, 38, 39, 40, 41, 42, 43, 44, 45, 46, 47, 48, 49, 50, 51, 52, 53, 54, 55, 56, 57, 58, 59, 60, 61, 62, 63, 64, 65, 66, 67, 68, 69, 70, 71, 72, 73, 74, 75, 76, 77, 78, 79, 80, 81, 82, 83, 84, 85, 86, 87, 88, 89, 90, 91, 92, 93, 94, 95, 96, 97, 98, 99, 100 or more than 100 residues relative to wild-type CYP5491 (SEQ ID NO: 208). In some embodiments, the mutation is an amino acid substitution, deletion, or insertion. In some embodiments, the mutation is located in one or more residues selected from residues: 48, 49, 57, 76, 103-107, 109, 110, 112, 113, 118-120, 209-212, 215, 277, 278, 281, 282, 285, 286, 350-355, 376, and/or 457-459 of CYP5491.

### Signal Peptides

[0086] As used in this application, a “signal peptide” or “signal sequence” refers to a localization signal that promotes targeting of a protein. For example, in the co-translational pathway in eukaryotes and prokaryotes, a signal-recognition particle (SRP) binds to signal peptides of proteins that are being translated by ribosomes and targets ribosome-nascent polypeptides to SRP receptors that are present on membranes (e.g., plasma membrane or endoplasmic reticulum membrane). In some embodiments, a signal peptide that is recognized by a SRP is referred to as an SRP-dependent signal sequence. In some embodiments, a signal peptide adopts an alpha-helical structure. In some embodiments, a signal peptide is 5-10, 10-20, 20-30, 30-40, 40-50, 50-60, or 60-70 amino acids in length. In some embodiments, a signal sequence is 5-80 amino acids in length. In some embodiments, a signal peptide is 5, 6, 7, 8, 9, 10, 11, 12, 13, 14, 15, 16, 17, 18, 19, 20, 21, 22, 23, 24, 25, 26, 27, 28, 29, 30, 31, 32, 33, 34, 35, 36, 37, 38, 39, 40, 41, 42, 43, 44, 45, 46, 47, 48, 49, 50, 51, 52, 53, 54, 55, 56, 57, 58, 59, 60, 61, 62, 63, 64, 65, 66, 67, 68, 69, 70, 71, 72, 73, 74, 75, 76, 77, 78, 79, or 80 amino acids in length. In some embodiments, a signal peptide comprises 1-10, 10-20, 20-30, 30-40, 40-50, 50-60, or 60-70 hydrophobic amino acids. In some embodiments, a signal sequence comprises 5-80 hydrophobic amino acids in length. In some embodiments, a signal peptide comprises 1, 2, 3, 4, 5, 6, 7, 8, 9, 10, 11, 12, 13, 14, 15, 16, 17, 18, 19, 20, 21, 22, 23, 24, 25, 26, 27, 28, 29, 30, 31, 32, 33, 34, 35, 36, 37, 38, 39, 40, 41, 42, 43, 44, 45, 46, 47, 48, 49, 50, 51, 52, 53, 54, 55, 56, 57, 58, 59, 60, 61, 62, 63, 64, 65, 66, 67, 68, 69, 70, 71, 72, 73, 74, 75, 76, 77, 78, 79, or 80 hydrophobic amino acids. Non-limiting examples of hydrophobic amino acids include alanine (Ala), valine (Val), leucine (Leu), isoleucine (Ile), phenylalanine (Phe), methionine (Met), tyrosine (Tyr) and tryptophan (Trp). In some instances, a signal peptide is an ER localization signal. In some embodiments, a signal peptide also functions as a stop-transfer sequence. In some embodiments, a signal peptide also functions as a membrane-anchor sequence.

[0087] As used in this application, an “SRP-dependent protein” refers to a protein that depends on SRP and the SRP receptor for targeting to a membrane. In some instances, the membrane is the endoplasmic reticulum (ER) membrane. Non-limiting examples of SRP-dependent proteins from S. cerevisiae include AIM20, ALG1, ALG5, ANP1, AUR1, BPT1, CAX4, CBR1, CDC50, CHO2, CPT1, CUE4, CWH43, DAP2, DUR3, ERD2, ERG11, ERG24, ERG25, ERG4, ERG5, ERP2, ERP4, ERV41, FET3, FTH1, FTR1, GAA1, GDA1, GET1, GPI13, GPI14, GPI17, GPI19, GPT2, GRX6, GUP1, HRD1, HXT2, HXT3, IFA38, IPT1, KAR2, KRE27, KTR6, LAS21, MAM3, MCH1, MEP1, MEP2, MEP3, MNN11, MSC2, MSC7, NCP1, NDC1, NHX1, NNF2, OCH1, OST4, PEX3, PGA2, PGA3, PHO8, PH088, PHS1, PIN2, PKR1, PMT1, POM33, RBD2, RTN1, RTN2, SMF3, SNA3, SNA4, SNL1, SPC1, SPC2, SRP102, SSH1, STE14, STE6, SUR1, SUR2, TMN3, TMS1, TSC3, TVP15, TYW1, VAN1, VCX1, VMA16, VMA21, VMA3, VPS68, VRG4, VTC1, YAR028W, YBR287W, YBT1, YCF1, YDL121C, YDR307W, YER053C-A, YET1, YET3, YHR045W, YHR138C, YKL063C, YLR050C, YLR413W, YML018C, YMR134W, YMR221C, YNL146W, YOL019W, YOP1, YPL162C, YPR091C, YRO2, ZRC1, and ZRT2. Table 1 depicts the start and end amino acid positions of signal peptides from non-limiting examples of SRP-dependent proteins.

TABLE 1
Non-limiting examples of signal peptides
from SRP-dependent proteins

| | | End | |
|---|---|---|---|
| | | amino | UniProt |
| | Start amino | acid | Accession |
| Name | acid position | position | Number |
| KAR2 | 1 | 42 | P16474 |
| NCP1 | 1 | 7 | P16603 |
| ERP2 | 1 | 25 | P39704 |
| RBD2 | 1 | 16 | Q12270 |
| SNA3 | 1 | 16 | P14359 |
| SPC2 | 1 | 37 | Q04969 |
| NHX1 | 1 | 61 | Q04121 |
| PGA2 | 1 | 22 | P53903 |
| GRX6 | 1 | 29 | Q12438 |
| YLR413W | 1 | 28 | Q06689 |
| YJL062W | 1 | 32 | P40367 |
| MSC2 | 1 | 6 | Q03455 |
| EMC5 | 1 | 6 | P40540 |
| CHO2 | 1 | 55 | P05374 |
| IFA38 | 1 | 19 | P38286 |
| SUR2 | 1 | 8 | P38992 |
| IPT1 | 1 | 24 | P38954 |
| YET3 | 1 | 6 | Q07451 |
| YPL162C | 1 | 13 | Q12042 |
| ERG11 | 1 | 26 | P10614 |
| SRP102 | 1 | 6 | P36057 |
| GUP1 | 1 | 43 | P53154 |
| CBR1 | 1 | 6 | P38626 |
| YHR138C | 1 | 19 | P38841 |

[0088] Non-limiting examples of signal peptide sequences are provided in SEQ ID NOs: 209-232. A C11 hydroxylase fusion may comprise a signal peptide sequence that is at least 5%, at least 10%, at least 15%, at least 20%, at least 25%, at least 30%, at least 35%, at least 40%, at least 45%, at least 50%, at least 55%, at least 60%, at least 65%, at least 70%, at least 71%, at least 72%, at least 73%, at least 74%, at least 75%, at least 76%, at least 77%, at least 78%, at least 79%, at least 80%, at least 81%, at least 82%, at least 83%, at least 84%, at least 85%, at least 86%, at least 87%, at least 88%, at least 89%, at least 90%, at least 91%, at least 92%, at least 93%, at least 94%, at least 95%, at least 96%, at least 97%, at least 98%, at least 99%, or at least 100% identical, including all values in between, to a signal peptide sequence selected from SEQ ID NOs: 209-232 (Table 4), to a signal peptide sequence disclosed in this application, or to a signal peptide sequence listed in Table 1.

[0089] A C11 hydroxylase fusion may comprise a signal peptide sequence that comprises at least 1, 2, 3, 4, 5, 6, 7, 8, 9, 10, 11, 12, 13, 14, 15, 16, 17, 18, 19, 20, 21, 22, 23, 24, 25, 26, 27, 28, 29, 30, 31, 32, 33, 34, 35, 36, 37, 38, 39, 40, 41, 42, 43, 44, 45, 46, 47, 48, 49, 50, 51, 52, 53, 54, 55, 56, 57, 58, 59, 60, 61, or 62 amino acid substitutions, deletions, or insertions relative to: a signal peptide sequence selected from SEQ ID NOs: 209-232 (Table 4); a signal peptide sequence listed in Table 1; or any signal peptide sequence disclosed in this application.

[0090] A C11 hydroxylase fusion may comprise a signal peptide sequence that comprises no more than 1, 2, 3, 4, 5, 6, 7, 8, 9, 10, 11, 12, 13, 14, 15, 16, 17, 18, 19, 20, 21, 22, 23, 24, 25, 26, 27, 28, 29, 30, 31, 32, 33, 34, 35, 36, 37, 38, 39, 40, 41, 42, 43, 44, 45, 46, 47, 48, 49, 50, 51, 52, 53, 54, 55, 56, 57, 58, 59, 60, 61, or 62 amino acid substitutions, deletions, or insertions relative to: a signal peptide sequence selected from SEQ ID NOs: 209-232 (Table 4); a signal peptide sequence listed in Table 1; or any signal peptide sequence disclosed in this application.

[0091] In some embodiments, a C11 hydroxylase fusion comprises a signal peptide sequence that comprises 1, 2, 3, 4, 5, 6, 7, 8, 9, 10, 11, 12, 13, 14, 15, 16, 17, 18, 19, 20, 21, 22, 23, 24, 25, 26, 27, 28, 29, 30, 31, 32, 33, 34, 35, 36, 37, 38, 39, 40, 41, 42, 43, 44, 45, 46, 47, 48, 49, 50, 51, 52, 53, 54, 55, 56, 57, 58, 59, 60, 61, or 62 amino acid substitutions, deletions, or insertions relative to: a signal peptide sequence selected from SEQ ID NOs: 209-232 (Table 4); a signal peptide sequence listed in Table 1; or any signal peptide sequence disclosed in this application.

[0092] In some embodiments, a C11 hydroxylase fusion comprises a signal peptide sequence that comprises 1 amino acid substitution, deletion, or insertion relative to: a signal peptide sequence selected from SEQ ID NOs: 209-232 (Table 4); a signal peptide sequence listed in Table 1; or any signal peptide sequence disclosed in this application.

[0093] A C11 hydroxylase or a C11 hydroxylase fusion of the present disclosure may comprise a sequence that is at least 5%, at least 10%, at least 15%, at least 20%, at least 25%, at least 30%, at least 35%, at least 40%, at least 45%, at least 50%, at least 55%, at least 60%, at least 65%, at least 70%, at least 71%, at least 72%, at least 73%, at least 74%, at least 75%, at least 76%, at least 77%, at least 78%, at least 79%, at least 80%, at least 81%, at least 82%, at least 83%, at least 84%, at least 85%, at least 86%, at least 87%, at least 88%, at least 89%, at least 90%, at least 91%, at least 92%, at least 93%, at least 94%, at least 95%, at least 96%, at least 97%, at least 98%, at least 99%, or at least 100% identical, including all values in between, to a sequence in Table 4, 5, or 7, or to any C11 hydroxylase or C11 hydroxylase fusion disclosed in this application, or to a sequence selected from SEQ ID NOs:113-114, 129-130, or 257-316.

[0094] A C11 hydroxylase or a C11 hydroxylase fusion of the present disclosure may comprise one or more point mutations disclosed in Table 3.

[0095] In some embodiments, a C11 hydroxylase fusion comprises a signal peptide from ERG11. In some embodiments, a C11 hydroxylase fusion comprises the first 25 amino acid residues from ERG11 and residues 3-473 from wild-type CYP5491. The amino acid sequence of this ERG11 N-terminal-CYP5491 fusion is provided as SEQ ID NO: 280. In some embodiments, a C11 hydroxylase or a C11 hydroxylase fusion includes a T351M point mutation.

[0096] In some embodiments, a C11 hydroxylase of the present disclosure is capable of oxidizing mogrol precursors (e.g., cucurbitadienol, 24,25-dihydroxy-cucurbitadienol, and/or 24,25-epoxy-cucurbitadienol (or 24,25 epoxy cucurbitadienol or 24,25-epoxy cucurbitadienol)). In some embodiments, a C11 hydroxylase of the present disclosure catalyzes the formation of mogrol. In some embodiments, a C11 hydroxylase uses cucurbitadienol as a substrate to produce 11-hydroxy-cucurbitadienol. In some embodiments, a C11 hydroxylase uses 24, 25 dihydroxy cucurbitadienol as a substrate to produce mogrol. In some embodiments, a C11 hydroxylase uses 24,25-epoxy cucurbitadienol to produce 11-hydroxy-24,25-epoxycucurbitadienol.

[0097] It should be appreciated that activity, such as specific activity, of a C11 hydroxylase can be determined by any means known to one of ordinary skill in the art. In some embodiments, activity (e.g., specific activity) of a C11 hydroxylase may be measured as the concentration of a mogrol precursor produced or mogrol produced per unit of enzyme per unit time. In some embodiments, a C11 hydroxylase of the present disclosure has an activity (e.g., specific activity) of at least 0.0001-0.001 μmol/min/mg, at least 0.001-0.01 μmol/min/mg, at least 0.01-0.1 μmol/min/mg, or at least 0.1-1 μmol/min/mg, including all values in between.

[0098] In some embodiments, the activity, such as specific activity, of a C11 hydroxylase is at least 1.1 fold (e.g., at least 1.3 fold, at least 1.5 fold, at least 1.7 fold, at least 1.9 fold, at least 2 fold, at least 2.5 fold, at least 3 fold, at least 4 fold, at least 5 fold, at least 10 fold, at least 20 fold, at least 30 fold, at least 40 fold, at least 50 fold, at least 100 fold, at least 1000 fold or at least 10000 fold, including all values in between) greater than that of a control C11 hydroxylase. In some embodiments, the control C11 hydroxylase is wild-type CYP5491 (SEQ ID NO: 208).

[0099] Without being bound by any particular theory, in some embodiments, the function of CYP5491 may be a rate limiting step in the mogrol biosynthesis pathway, as CYP5491 can produce 11 oxo mogrol (or 11-oxo-mogrol) as a side product. In some embodiments, mutation of one or more of the amino acids around the active site of wild-type CYP5491 may increase the production of mogrol. In some embodiments, mutation of one or more amino acids around the active site of wild-type CYP5491 increases the ratio of mogrol to oxo mogrol.

[0100] In some embodiments, a C11 hydroxylase of the present disclosure produces a ratio of mogrol to oxo mogrol of at least 1.1, at least 1.2, at least 1.3, at least 1.4, at least 1.5, at least 2, at least 3, at least 4, at least 5, at least 6, at least 7, at least 8, at least 9, at least 10, at least 11, at least 12, at least 13, at least 14, at least 15, at least 16, at least 17, at least 18, at least 19, at least 20, at least 21, at least 22, at least 23, at least 24, at least 25, at least 26, at least 27, at least 28, at least 29, at least 30, at least 31, at least 32, at least 33, at least 34, at least 35, at least 36, at least 37, at least 38, at least 39, at least 40, at least 41, at least 42, at least 43, at least 44, at least 45, at least 46, at least 47, at least 48, at least 49, at least 50, at least 55, at least 60, at least 65, at least 70, at least 75, at least 80, at least 85, at least 90, at least 95, or at least 100, including all values in between.

[0101] In some embodiments, a C11 hydroxylase of the present disclosure produces increased mogrol compared to a control C11 hydroxylase. In some embodiments, the control C11 hydroxylase is wild-type CYP5491 (SEQ ID NO: 208).

[0102] In some embodiments, a C11 hydroxylase of the present disclosure produces at least 1.1, at least 1.2, at least 1.3, at least 1.4, at least 1.5, at least 2, at least 3, at least 4, at least 5, at least 6, at least 7, at least 8, at least 9, at least 10, at least 11, at least 12, at least 13, at least 14, at least 15, at least 16, at least 17, at least 18, at least 19, at least 20, at least 21, at least 22, at least 23, at least 24, at least 25, at least 26, at least 27, at least 28, at least 29, at least 30, at least 31, at least 32, at least 33, at least 34, at least 35, at least 36, at least 37, at least 38, at least 39, at least 40, at least 41, at least 42, at least 43, at least 44, at least 45, at least 46, at least 47, at least 48, at least 49, at least 50, at least 55, at least 60, at least 65, at least 70, at least 75, at least 80, at least 85, at least 90, at least 95, or at least 100 times more mogrol compared to a control C11 hydroxylase, including all values in between. In some embodiments, the control C11 hydroxylase is wild-type CYP5491 (SEQ ID NO: 208).

### Cytochrome P450 Reductase Enzymes

[0103] Aspects of the present disclosure provide cytochrome P450 reductase enzymes, which may be useful, for example, in the production of mogrol. Cytochrome P450 reductase is also referred to as NADPH:ferrihemoprotein oxidoreductase, NADPH:hemoprotein oxidoreductase, NADPH:P450 oxidoreductase, P450 reductase, POR, CPR, and CYPOR. These reductases can promote C11 hydroxylase activity by catalyzing electron transfer from NADPH to C11 hydroxylase.

[0104] Cytochrome P450 reductases of the present disclosure may comprise a sequence that is at least 5%, at least 10%, at least 15%, at least 20%, at least 25%, at least 30%, at least 35%, at least 40%, at least 45%, at least 50%, at least 55%, at least 60%, at least 65%, at least 70%, at least 71%, at least 72%, at least 73%, at least 74%, at least 75%, at least 76%, at least 77%, at least 78%, at least 79%, at least 80%, at least 81%, at least 82%, at least 83%, at least 84%, at least 85%, at least 86%, at least 87%, at least 88%, at least 89%, at least 90%, at least 91%, at least 92%, at least 93%, at least 94%, at least 95%, at least 96%, at least 97%, at least 98%, at least 99%, or at least 100% identical, including all values in between, to a cytochrome P450 reductase sequence (e.g., nucleic acid or amino acid sequence) in Table 6 or Table 7, or any P450 reductase sequence disclosed in this application or known in the art, or a sequence selected from SEQ ID NOs: 115, 116, 131, 132, 398-399, and 407-408.

[0105] In some embodiments, a cytochrome P450 reductase of the present disclosure is capable of promoting oxidation of a mogrol precursor (e.g., cucurbitadienol, 11-hydroxycucurbitadienol, 24,25-dihydroxy-cucurbitadienol, and/or 24,25-epoxy-cucurbitadienol). In some embodiments, a cytochrome P450 reductase of the present disclosure catalyzes the formation of a mogrol precursor or mogrol.

[0106] It should be appreciated that activity, such as specific activity, of a cytochrome P450 reductase can be measured by any means known to one of ordinary skill in the art. In some embodiments, such activity may be measured as the concentration of a mogrol precursor produced or mogrol produced per unit enzyme per unit time in the presence of a C11 hydroxylase. In some embodiments, a cytochrome P450 reductase of the present disclosure has an activity, such as specific activity, of at least 0.0001-0.001 mol/min/mg, at least 0.001-0.01 mol/min/mg, at least 0.01-0.1 mol/min/mg, or at least 0.1-1 mol/min/mg, including all values in between.

[0107] In some embodiments, the activity, such as specific activity, of a cytochrome P450 reductase is at least 1.1 fold (e.g., at least 1.3 fold, at least 1.5 fold, at least 1.7 fold, at least 1.9 fold, at least 2 fold, at least 2.5 fold, at least 3 fold, at least 4 fold, at least 5 fold, at least 10 fold, at least 20 fold, at least 30 fold, at least 40 fold, at least 50 fold, at least 100 fold, at least 1000 fold or at least 10000 fold, including all values in between) greater than that of a control cytochrome P450 reductase.

### Epoxide Hydrolase Enzymes (EPHs)

[0108] Aspects of the present disclosure provide epoxide hydrolase enzymes (EPHs), which may be useful, for example, in the conversion of 24-25 epoxy-cucurbitadienol to 24-25 dihydroxy-cucurbitadienol or in the conversion of 11-hydroxy-24,25-epoxycucurbitadienol to mogrol. EPHs are capable of converting an epoxide into two hydroxyls.

[0109] EPHs of the present disclosure may comprise a sequence that is at least 5%, at least 10%, at least 15%, at least 20%, at least 25%, at least 30%, at least 35%, at least 40%, at least 45%, at least 50%, at least 55%, at least 60%, at least 65%, at least 70%, at least 71%, at least 72%, at least 73%, at least 74%, at least 75%, at least 76%, at least 77%, at least 78%, at least 79%, at least 80%, at least 81%, at least 82%, at least 83%, at least 84%, at least 85%, at least 86%, at least 87%, at least 88%, at least 89%, at least 90%, at least 91%, at least 92%, at least 93%, at least 94%, at least 95%, at least 96%, at least 97%, at least 98%, at least 99%, or at least 100% identical, including all values in between, to an EPH sequence (e.g., nucleic acid or amino acid sequence) in Table 6 or Table 7, or to any of the EPH sequences disclosed in this application or known in the art, or to a sequence selected from SEQ ID NOs: 117-125, 133-141, 401-402, and 410-411.

[0110] In some embodiments, a recombinant EPH of the present disclosure is capable of promoting hydrolysis of an epoxide in a cucurbitadienol compound (e.g., hydrolysis of the epoxide in 24-25 epoxy-cucurbitadienol). In some embodiments, an EPH of the present disclosure catalyzes the formation of a mogrol precursor (e.g., 24-25 dihydroxy-cucurbitadienol).

[0111] It should be appreciated that activity, such as specific activity, of an EPH can be measured by any means known to one of ordinary skill in the art. In some embodiments, activity, such as specific activity, of an EPH may be measured as the concentration of a mogrol precursor (e.g., 24-25 dihydroxy-cucurbitadienol) or mogrol produced. In some embodiments, the concentration of mogrol precursor, including 24,25 dihydroxy-cucurbitadienol, is measured in terms of, for example, normalized peak areas of a chromatogram, rather than absolute titer. In some embodiments, use of normalized peak areas is useful when there is a lack of an analytical standard for a mogrol precursor.

### Squalene Epoxidase Enzymes (SQEs)

[0112] Aspects of the present disclosure provide SQEs, which are capable of oxidizing a squalene (e.g., squalene or 2-3-oxidosqualene) to produce a squalene epoxide (e.g., 2-3-oxidosqualene or 2-3, 22-23-diepoxysqualene). SQEs may also be referred to as squalene monooxygenases.

[0113] SQEs of the present disclosure may comprise a sequence that is at least 5%, at least 10%, at least 15%, at least 20%, at least 25%, at least 30%, at least 35%, at least 40%, at least 45%, at least 50%, at least 55%, at least 60%, at least 65%, at least 70%, at least 71%, at least 72%, at least 73%, at least 74%, at least 75%, at least 76%, at least 77%, at least 78%, at least 79%, at least 80%, at least 81%, at least 82%, at least 83%, at least 84%, at least 85%, at least 86%, at least 87%, at least 88%, at least 89%, at least 90%, at least 91%, at least 92%, at least 93%, at least 94%, at least 95%, at least 96%, at least 97%, at least 98%, at least 99%, or at least 100% identical, including all values in between, to an SQE sequence (e.g., nucleic acid or amino acid sequence) in Table 6 or Table 7, or to any of the SQEs disclosed in this application or known in the art, or to a sequence selected from SEQ ID NOs: 126-128, 142-144, 404, or 413.

[0114] In some embodiments, a recombinant SQE of the present disclosure is capable of promoting formation of an epoxide in a squalene compound (e.g., epoxidation of squalene or 2,3-oxidosqualene). In some embodiments, an SQE of the present disclosure catalyzes the formation of a mogrol precursor (e.g., 2-3-oxidosqualene or 2-3, 22-23-diepoxysqualene) or 24,25 diepoxy-cucurbitadienol).

[0115] Activity of a recombinant SQE may be measured by determining the increase in levels of 2-3, 22-23 diepoxy cucurbitadienol and/or dihydroxycucurbitadienol by normalized chromatogram peak area improvement over a control enzyme. In some embodiments, the control enzyme is ERG1 (SEQ ID NO: 413) in Table 6. In some embodiments, activity, such as specific activity, of a recombinant SQE may be measured as the concentration of a mogrol precursor (e.g., 2-3-oxidosqualene or 2-3, 22-23-diepoxysqualene or 24,25-diepoxy-cucurbitadienol) produced per unit of enzyme per unit of time.

[0116] Without being bound by a particular theory, expression of an SQE in a host cell may increase the production of a mogrol precursor (e.g., epoxy-cucurbitadineol, squalene-dioxide and 2,3-oxidosqualene).

[0117] In some embodiments, potential toxicity associated with expression of an SQE is mitigated. As a non-limiting example, methods of reducing toxicity can include increasing expression of downstream enzymes, including EPH and/or C11 hydroxylase with a cytochrome P450 reductase. Without being bound by a particular theory, expression of EPH and/or C11 hydroxylase with a cytochrome P450 reductase may reduce toxicity by promoting the conversion of epoxide molecules into either dihydroxy cucurbitadienol or mogrol. In some embodiments, toxicity reduction comprises expressing one or more UGTs. Without being bound by a particular theory, expression of one or more UGTs may reduce toxicity by increasing the production of glycosylated compounds.

### Cucurbitadienol Synthase (CDS) Enzymes

[0118] Aspects of the present disclosure provide cucurbitadienol synthase (CDS) enzymes, which may be useful, for example, in the production of a cucurbitadienol compound, such as 24-25 epoxy-cucurbitadienol or cucurbitadienol). CDSs are capable of catalyzing the formation of cucurbitadienol compounds, such as 24-25 epoxy-cucurbitadienol or cucurbitadienol from oxidosqualene (e.g., 2-3-oxidosqualene or 2,3; 22,23-diepoxysqualene).

[0119] In some embodiments, CDSs have a leucine at a residue corresponding to position 123 of SEQ ID NO: 74 that distinguishes them from other oxidosqualene cyclases, as discussed in Takase et al. Org. Biomol. Chem., 2015, 13, 7331-7336, which is incorporated by reference in its entirety.

[0120] CDSs of the present disclosure may comprise a sequence that is at least 5%, at least 10%, at least 15%, at least 20%, at least 25%, at least 30%, at least 35%, at least 40%, at least 45%, at least 50%, at least 55%, at least 60%, at least 65%, at least 70%, at least 71%, at least 72%, at least 73%, at least 74%, at least 75%, at least 76%, at least 77%, at least 78%, at least 79%, at least 80%, at least 81%, at least 82%, at least 83%, at least 84%, at least 85%, at least 86%, at least 87%, at least 88%, at least 89%, at least 90%, at least 91%, at least 92%, at least 93%, at least 94%, at least 95%, at least 96%, at least 97%, at least 98%, at least 99%, or 100% identical, including all values in between, to a nucleic acid or amino acid sequence in Table 8, to a sequence selected from SEQ ID NOs: 1-80, or to any other CDS sequence disclosed in this application or known in the art.

[0121] In some embodiments a CDS enzyme corresponds to AquAagaCDS16 (SEQ ID NO: 43), CSPI06G07180.1 (SEQ ID NO: 52), or A0A1S3CBF6 (SEQ ID NO: 49).

[0122] In some embodiments, a nucleic acid sequence encoding a CDS enzyme may be re-coded for expression in a particular host cell, including S. cerevisiae. In some embodiments, a re-coded nucleic acid sequence encoding a CDS enzyme corresponds to SEQ ID NO: 34.

[0123] In some embodiments, a CDS of the present disclosure is capable of using oxidosqualene (e.g., 2,3-oxidosqualene or 2,3; 22,23-diepoxysqualene) as a substrate. In some embodiments, a CDS of the present disclosure is capable of producing cucurbitadienol compounds (e.g., 24-25 epoxy-cucurbitadienol or cucurbitadienol). In some embodiments, a CDS of the present disclosure catalyzes the formation of cucurbitadienol compounds (e.g., 24-25 epoxy-cucurbitadienol or cucurbitadienol) from oxidosqualene (e.g., 2-3-oxidosqualene or 2,3; 22,23-diepoxysqualene).

[0124] It should be appreciated that activity of a CDS can be measured by any means known to one of ordinary skill in the art. In some embodiments, the activity of a CDS may be measured as the normalized peak area of cucurbitadienol produced. In some embodiments, this activity is measured in arbitrary units. In some embodiments, the activity, such as specific activity, of a CDS of the present disclosure is at least 1.1 fold (e.g., at least 1.3 fold, at least 1.5 fold, at least 1.7 fold, at least 1.9 fold, at least 2 fold, at least 2.5 fold, at least 3 fold, at least 4 fold, at least 5 fold, at least 10 fold, at least 20 fold, at least 30 fold, at least 40 fold, at least 50 fold, or at least 100 fold, including all values in between) greater than that of a control CDS.

[0125] It should be appreciated that one of ordinary skill in the art would be able to characterize a protein as a CDS enzyme based on structural and/or functional information associated with the protein. For example, in some embodiments, a protein can be characterized as a CDS enzyme based on its function, such as the ability to produce cucurbitadienol compounds (e.g., 24-25 epoxy-cucurbitadienol or cucurbitadienol) using oxidosqualene (e.g., 2,3-oxidosqualene or 2,3; 22,23-diepoxysqualene) as a substrate. In some embodiments, a protein can be characterized, at least in part, as a CDS enzyme based on the presence of a leucine residue at a position corresponding to position 123 of SEQ ID NO: 74.

[0126] In some embodiments, a recombinant host cell that expresses a heterologous gene encoding a cucurbitadienol synthase (CDS) enzyme produces at least 10%, 20%, 30%, 40%, 50%, 60%, 70%, 80%, 90%, or 100% more cucurbitadienol compound compared to the same recombinant host cell that does not express the heterologous gene.

[0127] In other embodiments, a protein can be characterized as a CDS enzyme based on the percent identity between the protein and a known CDS enzyme. For example, the protein may be at least 10%, 15%, 20%, 25%, 30%, 35%, 40%, 45%, 50%, 55%, 60%, 65%, 70%, 75%, 80%, 85%, 90%, 91%, 92%, 93%, 94%, 95%, 96%, 97%, 98%, 99%, or 100% identical, including all values in between, to any of the CDS sequences described in this application or the sequence of any other CDS enzyme. In other embodiments, a protein can be characterized as a CDS enzyme based on the presence of one or more domains in the protein that are associated with CDS enzymes. For example, in certain embodiments, a protein is characterized as a CDS enzyme based on the presence of a substrate channel and/or an active-site cavity characteristic of CDS enzymes known in the art. In some embodiments, the active-site cavity comprises a residue that acts a gate to this channel, helping to exclude water from the cavity. In some embodiments, the active-site comprises a residue that acts a proton donor to open the epoxide of the substrate and catalyze the cyclization process.

[0128] In other embodiments, a protein can be characterized as a CDS enzyme based on a comparison of the three-dimensional structure of the protein compared to the three-dimensional structure of a known CDS enzyme. It should be appreciated that a CDS enzyme can be a synthetic protein.

### UDP-Glycosyltransferases (UGT) Enzymes

[0129] Aspects of the present disclosure provide UDP-glycosyltransferase enzymes (UGTs), which may be useful, for example, in the production of a mogroside (e.g., mogroside I-A1 (MIA1), mogroside I-E (MIE), mogroside II-A1 (MIIA1), mogroside II-A2 (MIIA2), mogroside III-A1 (MIIIA1), mogroside II-E (MIIE), mogroside III (MIII), siamenoside I, mogroside III-E (MIIIE), mogroside IV, mogroside IVa, isomogroside IV, mogroside V, or mogroside VI).

[0130] As used in this application, a UGT is an enzyme that is capable of catalyzing the addition of the glycosyl group from a UTP-sugar to a compound (e.g., mogroside or mogrol). Structurally, UGTs often comprise a UDPGT (Prosite: PS00375) domain and a catalytic dyad. As a non-limiting example, one of ordinary skill in the art may identify a catalytic dyad in a UGT by aligning the UGT sequence to UGT94-289-1 (a wildtype UGT sequence from the monk fruit Siraitia grosvenorii) and identifying the two residues in the UGT that correspond to histidine 21 (H21) and aspartate 122 (D122) of UGT94-289-1.

[0131] The amino acid sequence for UGT94-289-1 is:

(SEQ ID NO: 109)
MDAQRGHTTTILMFPWLGYGHLSAFLELAKSLSRRNFHIYFCSTSVNLDA
IKPKLPSSSSSDSIQLVELCLPSSPDQLPPHLHTTNALPPHLMPTLHQAF
SMAAQHFAAILHTLAPHLLIYDSFQPWAPQLASSLNIPAINFNTTGASVL
TRMLHATHYPSSKFPISEFVLHDYWKAMYSAAGGAVTKKDHKIGETLANC
LHASCSVILINSFRELEEKYMDYLSVLLNKKVVPVGPLVYEPNQDGEDEG
YSSIKNWLDKKEPSSTVFVSFGSEYFPSKEEMEEIAHGLEASEVHFIWVV
RFPQGDNTSAIEDALPKGFLERVGERGMVVKGWAPQAKILKHWSTGGFVS
HCGWNSVMESMMFGVPIIGVPMHLDQPFNAGLAEEAGVGVEAKRDPDGKI
QRDEVAKLIKEVVVEKTREDVRKKAREMSEILRSKGEEKMDEMVAAISLF
LKI.

[0132] A non-limiting example of a nucleic acid sequence encoding UGT94-289-1 is:

(SEQ ID NO: 93)
ATGGACGCGCAACGCGGACATACGACTACCATCCTGATGTTTCCGTGGTT
GGGGTACGGCCACCTTAGTGCATTCCTCGAATTAGCCAAGAGCTTGTCGC
GTAGGAACTTTCATATTTATTTCTGTTCCACATCTGTCAATTTAGATGCT
ATAAAACCCAAACTACCATCATCTTCAAGTTCCGATTCTATTCAGCTTGT
AGAGTTATGCTTGCCTTCCTCGCCAGACCAACTACCCCCACACCTGCATA
CAACTAATGCTCTACCTCCACATCTAATGCCTACCCTGCACCAGGCCTTT
TCAATGGCAGCTCAACATTTTGCAGCTATATTACATACTTTAGCACCGCA
CTTGTTAATCTATGATTCGTTCCAGCCTTGGGCGCCACAATTGGCCAGCT
CTCTTAACATTCCTGCTATTAATTTTAATACCACGGGTGCCAGTGTGCTA
ACAAGAATGTTACACGCGACTCATTACCCATCTTCAAAGTTCCCAATCTC
CGAATTTGTTTTACATGATTATTGGAAAGCAATGTATTCAGCAGCTGGTG
GTGCTGTTACAAAAAAGGACCATAAAATAGGAGAAACCTTGGCAAACTGT
TTACACGCTTCTTGCTCGGTAATTCTGATCAATTCATTCAGAGAGTTGGA
AGAAAAATACATGGATTACTTGTCTGTCTTACTAAACAAGAAAGTTGTGC
CCGTGGGTCCGCTTGTTTATGAGCCAAACCAAGATGGCGAAGACGAAGGT
TATAGTTCGATAAAGAATTGGCTCGATAAAAAGGAGCCCTCCTCAACTGT
CTTTGTTTCCTTCGGGTCCGAATATTTTCCGTCCAAAGAAGAAATGGAAG
AAATTGCCCATGGCTTGGAGGCTAGCGAGGTACACTTTATTTGGGTCGTT
AGATTCCCACAAGGAGACAATACTTCTGCAATTGAAGATGCCCTTCCTAA
GGGTTTTCTTGAGCGAGTGGGCGAACGTGGAATGGTGGTTAAGGGTTGGG
CTCCTCAGGCCAAAATTTTGAAACATTGGAGCACAGGCGGTTTCGTAAGT
CATTGTGGATGGAATAGTGTTATGGAGAGCATGATGTTTGGTGTACCCAT
AATAGGTGTTCCGATGCATTTAGATCAACCATTTAATGCAGGGCTCGCGG
AAGAAGCAGGAGTAGGGGTAGAGGCTAAAAGGGACCCTGATGGTAAGATA
CAGAGAGATGAAGTCGCTAAACTGATCAAAGAAGTGGTTGTCGAAAAAAC
GCGCGAAGATGTCAGAAAGAAGGCTAGGGAAATGTCTGAAATTTTACGTT
CGAAAGGTGAGGAAAAGATGGACGAGATGGTTGCAGCCATTAGTCTCTTC
TTGAAGATATAA.

[0133] One of ordinary skill in the art would readily recognize how to determine for any UGT enzyme what amino acid residue corresponds to a specific amino acid residue in UGT94-289-1 (SEQ ID NO: 109) by, for example, aligning sequences and/or by comparing secondary structures.

[0134] In some embodiments, a UGT of the present disclosure comprises a sequence (e.g., nucleic acid or amino acid sequence) that is at least 5%, at least 10%, at least 15%, at least 20%, at least 25%, at least 30%, at least 35%, at least 40%, at least 45%, at least 50%, at least 55%, at least 60%, at least 65%, at least 70%, at least 71%, at least 72%, at least 73%, at least 74%, at least 75%, at least 76%, at least 77%, at least 78%, at least 79%, at least 80%, at least 81%, at least 82%, at least 83%, at least 84%, at least 85%, at least 86%, at least 87%, at least 88%, at least 89%, at least 90%, at least 91%, at least 92%, at least 93%, at least 94%, at least 95%, at least 96%, at least 97%, at least 98%, at least 99%, or 100% identical, including all values in between, to a sequence in Table 9, or to a sequence selected from SEQ ID NOs: 81-112, or to any UGT sequence disclosed in this application or known in the art.

[0135] In some embodiments, a UGT of the present disclosure may comprise an amino acid substitution at an amino acid residue corresponding to an amino acid residue in wild-type UGT94-289-1 (SEQ ID NO: 109). A UGT of the present disclosure can comprise a conservative amino acid substitution and/or a non-conservative amino acid substitution. In some embodiments, a UGT of the present disclosure comprises 1, 2, 3, 4, 5, 6, 7, 8, 9, 10 or more than 10 conservative amino acid substitution(s). In some embodiments, a UGT of the present disclosure comprises 1, 2, 3, 4, 5, 6, 7, 8, 9, 10 or more than 10 non-conservative amino acid substitutions. In some embodiments, a conservative or non-conservative amino acid substitution is not located in a conserved region of a UGT protein. In some embodiments, a conservative or non-conservative amino acid substitution is not located in a region corresponding to: residues 83 to 92; residues 179 to 198; residue N143; residue L374; residue H21; or residue D122 of wild-type UGT94-289-1. One of ordinary skill in the art would readily be able to test a UGT that comprises a conservative and/or non-conservative substitution to determine whether the conservative and/or non-conservative substitution impacts the activity or function of the UGT.

[0136] An amino acid residue that contains a substitution can be an amino acid that corresponds to an amino acid residue in wild-type UGT94-289-1 (SEQ ID NO: 109) selected from, e.g., S123; F124; N143; T144; T145; V149; Y179; G18; S180; A181; G184; A185; V186; T187; K189; Y19; H191; K192; G194; E195; A198; F276; N355; H373; L374; N47; H83; T84; T85; N86; P89; and/or L92. Non-limiting examples of such amino acid substitutions include: S123 may be mutated to alanine, cysteine, glycine or valine, or to any conservative substitution of alanine, cysteine, glycine or valine; F124 may be mutated to tyrosine or to any conservative substitution of tyrosine; N143 may be mutated to alanine, cysteine, glutamate, isoleucine, leucine, methionine, glutamine, serine, threonine or valine, or to any conservative substitution of alanine, cysteine, glutamate, isoleucine, leucine, methionine, glutamine, serine, threonine or valine; T144 may be mutated to alanine, cysteine, asparagine or proline, or to any conservative substitution of alanine, cysteine, asparagine or proline; T145 may be mutated to alanine, cysteine, glycine, methionine, asparagine, glutamine, or serine, or any conservative substitution of alanine, cysteine, glycine, methionine, asparagine, glutamine, or serine; V149 may be mutated to cysteine, leucine or methionine, or to any conservative substitution of cysteine, leucine or methionine; Y179 may be mutated to glutamate, phenylalanine, histidine, isoleucine, lysine, leucine, valine, or tryptophan, or to any conservative substitution glutamate, phenylalanine, histidine, isoleucine, lysine, leucine, valine, or tryptophan; G18 may be mutated to serine or to any conservative substitution of serine; S180 may be mutated to alanine or valine, or to any conservative substitution of alanine or valine; A181 may be mutated to lysine or threonine, or to any conservative substitution of lysine or threonine; G184 may be mutated to alanine, cysteine, aspartate, glutamate, phenylalanine, histidine, isoleucine, lysine, methionine, asparagine, proline, glutamine, arginine, serine, threonine, or tyrosine, or to any conservative substitution of alanine, cysteine, aspartate, glutamate, phenylalanine, histidine, isoleucine, lysine, methionine, asparagine, proline, glutamine, arginine, serine, threonine, or tyrosine; A185 may be mutated to cysteine, aspartate, glutamate, glycine, lysine, leucine, methionine, asparagine, proline, glutamine, threonine, tryptophan or tyrosine, or to any conservative substitution of cysteine, aspartate, glutamate, glycine, lysine, leucine, methionine, asparagine, proline, glutamine, threonine, tryptophan or tyrosine; V186 may be mutated to alanine, cysteine, aspartate, glutamate, glycine, isoleucine, lysine, leucine, methionine, asparagine, proline, glutamine, arginine, threonine, tryptophan, or tyrosine, or to any conservative substitution of alanine, cysteine, aspartate, glutamate, glycine, isoleucine, lysine, leucine, methionine, asparagine, proline, glutamine, arginine, threonine, tryptophan, or tyrosine; T187 may be mutated to alanine, cysteine, aspartate, glutamate, glycine, histidine, isoleucine, lysine, leucine, asparagine, proline, arginine, serine, valine, tryptophan, or tyrosine, or to any conservative substitution of alanine, cysteine, aspartate, glutamate, glycine, histidine, isoleucine, lysine, leucine, asparagine, proline, arginine, serine, valine, tryptophan, or tyrosine; K189 may be mutated to alanine, cysteine, aspartate, glutamate, phenylalanine, glycine, histidine, isoleucine, leucine, methionine, proline, glutamine, arginine, serine, threonine, valine, tryptophan, or tyrosine, or to any conservative substitution thereof of alanine, cysteine, aspartate, glutamate, phenylalanine, glycine, histidine, isoleucine, leucine, methionine, proline, glutamine, arginine, serine, threonine, valine, tryptophan, or tyrosine; Y19 may be mutated to phenylalanine, histidine, leucine, or valine, or to any conservative substitution of phenylalanine, histidine, leucine, or valine; H191 may be mutated to alanine, cysteine, aspartate, glutamate, glycine, lysine, methionine, proline, glutamine, serine, threonine, valine, tryptophan, or tyrosine, or to any conservative substitution of mutated to alanine, cysteine, aspartate, glutamate, glycine, lysine, methionine, proline, glutamine, serine, threonine, valine, tryptophan, or tyrosine; K192 may be mutated to cysteine or phenylalanine, or to any conservative substitution of cysteine or phenylalanine; G194 may be mutated to aspartate, leucine, methionine, asparagine, proline, serine, or tryptophan, or to any conservative substitution of aspartate, leucine, methionine, asparagine, proline, serine, or tryptophan; E195 may be mutated to alanine, isoleucine, lysine, leucine, asparagine, glutamine, serine, threonine, or tyrosine, or to any conservative substitution of alanine, isoleucine, lysine, leucine, asparagine, glutamine, serine, threonine, or tyrosine; A198 may be mutated to cysteine, aspartate, glutamate, phenylalanine, histidine, isoleucine, lysine, leucine, methionine, asparagine, proline, glutamine, arginine, serine, threonine, valine, or tyrosine, or to any conservative substitution of cysteine, aspartate, glutamate, phenylalanine, histidine, isoleucine, lysine, leucine, methionine, asparagine, proline, glutamine, arginine, serine, threonine, valine, or tyrosine; F276 may be mutated to cysteine or glutamine, or to any conservative substitution of cysteine or glutamine; N355 may be mutated to glutamine or serine, or any conservative substitution thereof; H373 may be mutated to lysine, leucine, methionine, arginine, valine, or tyrosine, or to any conservative substitution of lysine, leucine, methionine, arginine, valine, or tyrosine; L374 may be mutated to alanine, cysteine, phenylalanine, histidine, methionine, asparagine, glutamine, serine, threonine, valine, tryptophan, or tyrosine, or to any conservative substitution of alanine, cysteine, phenylalanine, histidine, methionine, asparagine, glutamine, serine, threonine, valine, tryptophan, or tyrosine; N47 may be mutated to glycine or to any conservative substitution of glycine; H83 may be mutated to glutamine or tryptophan, or to any conservative substitution of glutamine or tryptophan; T84 may be mutated to tyrosine or to any conservative substitution of tyrosine; T85 may be mutated to glycine, lysine, proline, serine, or tyrosine, or to any conservative substitution of glycine, lysine, proline, serine, or tyrosine; N86 may be mutated to alanine, cysteine, glutamate, isoleucine, lysine, leucine, serine, tryptophan, or tyrosine, or to any conservative substitution of alanine, cysteine, glutamate, isoleucine, lysine, leucine, serine, tryptophan, or tyrosine; P89 may be mutated to methionine or serine or to any conservative substitution of methionine or serine; and/or L92 may be mutated to histidine or lysine or to any conservative substitution of histidine or lysine.

[0137] In some embodiments, a UGT enzyme contains an amino acid substitution located within 10 angstrom, 9 angstrom 8 angstrom, 7 angstrom, 6 angstrom, 5 angstrom, 4 angstrom, 3 angstrom, 2 angstrom, or within 1 angstrom (including all values in between) of a catalytic dyad. The catalytic dyad may correspond to residues 21 and 122 of wildtype UGT94-289-1 (e.g., histidine 21 and aspartate acid 122). It should be appreciated that one of ordinary skill in the art would readily recognize how to determine to corresponding location of the catalytic dyad in any UGT enzyme, for example, by aligning the sequence and/or by comparing the secondary structure with UGT94-289-1 (SEQ ID NO: 109).

[0138] In some embodiments, a UGT enzyme contains an amino acid substitution at an amino acid residue located in one or more structural motifs of the UGT. Non-limiting examples of secondary structures in UGTs, such as UGT94-289-1 (SEQ ID NO: 109), include: the loop between beta sheet 4 and alpha helix 5; beta sheet 5; the loop between beta sheet 5 and alpha helix 6; alpha helix 6; the loop between alpha helix 6 & 7; the loop between beta sheet 1 & alpha helix 1; alpha helix 7; the loop between alpha helix 7 & 8; alpha helix 1; alpha helix 8; the loop between beta sheet 8 & alpha helix 13; alpha helix 17; the loop between beta sheet 12 & alpha helix 18; alpha helix 2; loop between beta sheet 3 & alpha helix 3; alpha helix 3; and the loop between alpha helix 3 & 4; loop 8; beta sheet 5; loop 10; alpha helix 5; loop 11; loop 2; alpha helix 6; loop 12; alpha helix 1; alpha helix 7; loop 18; alpha helix 14; loop 26; alpha helix 2; loop 6; and alpha helix 3.

[0139] In some embodiments, the UGT comprises an amino acid substitution at an amino acid residue corresponding to the amino acid residue in wild-type UGT94-289-1 (SEQ ID NO: 109) selected from: N143 and L374. In some embodiments, the residue corresponding to N143 is mutated to a negatively charged R group, a polar uncharged R group, or a nonpolar aliphatic R group. In some embodiments, the residue corresponding to L374 is mutated to a nonpolar aliphatic R group, a positively charged R group, a polar uncharged R group, or a nonpolar aromatic R group.

[0140] The UGTs of the present disclosure may be capable of glycosylating mogrol or a mogroside at any of the oxygenated sites (e.g., at C3, C11, C24, and C25). In some embodiments, the UGT is capable of branching glycosylation (e.g., branching glycosylation of a mogroside at C3 or C24).

[0141] Non-limiting examples of suitable substrates for the UGTs of the present disclosure include mogrol and mogrosides (e.g., mogroside IA1 (MIA1), mogroside IE (MIE), mogroside II-A1 (MIIA1), mogroside III-A1 (MIIIA1), mogroside II-E (MIIE), mogroside III (MIII), or mogroside III-E (MIIIE), siamenoside I).

[0142] In some embodiments, the UGTs of the present disclosure are capable of producing mogroside IA1 (MIA1), mogroside IE (MIE), mogroside II-A1 (MIIA1), mogroside II-A2 (MIIA2), mogroside III-A1 (MIIIA1), mogroside II-E (MIIE), mogroside III (MIII), siamenoside I, mogroside III-E (MIIIE), mogroside IV, mogroside IVa, isomogroside IV, and/or mogroside V.

[0143] In some embodiments, the UGT is capable of catalyzing the conversion of mogrol to MIA1; mogrol to MIE1; MIA1 to MIIA1; MIE1 to MIIE; MIIA1 to MIIIA1; MIA1 to MIIE; MIIA1 to MIII; MIIIA1 to siamenoside I; MIIE to MIII; MIII to siamenoside I; MIIE to MIIE; and/or MIIIE to siamenoside I.

[0144] It should be appreciated that activity, such as specific activity, of a UGT can be measured by any means known to one of ordinary skill in the art. In some embodiments, the activity, such as specific activity, of a UGT (e.g., a variant UGT) may be determined by measuring the amount of glycosylated mogroside produced per unit enzyme per unit time. For example, the activity, such as specific activity, may be measured in mmol glycosylated mogroside target produced per gram of enzyme per hour. In some embodiments, a UGT of the present disclosure (e.g., variant UGT) may have an activity, such as specific activity, of at least 0.1 mmol (e.g., at least 1 mmol, at least 1.5 mmol, at least 2 mmol, at least 2.5 mmol, at least 3, at least 3.5 mmol, at least 4 mmol, at least 4.5 mmol, at least 5 mmol, at least 10 mmol, including all values in between) glycosylated mogroside target produced per gram of enzyme per hour.

[0145] In some embodiments, the activity, such as specific activity, of a UGT of the present disclosure is at least 1.1 fold (e.g., at least 1.3 fold, at least 1.5 fold, at least 1.7 fold, at least 1.9 fold, at least 2 fold, at least 2.5 fold, at least 3 fold, at least 4 fold, at least 5 fold, at least 10 fold, at least 20 fold, at least 30 fold, at least 40 fold, at least 50 fold, or at least 100 fold, including all values in between) greater than that of a control UGT. In some embodiments, the control UGT is UGT94-289-1 (SEQ ID NO: 109). In some embodiments, for a UGT that has an amino acid substitution, a control UGT is the same UGT but without the amino acid substitution.

[0146] It should be appreciated that one of ordinary skill in the art would be able to characterize a protein as a UGT enzyme based on structural and/or functional information associated with the protein. For example, a protein can be characterized as a UGT enzyme based on its function, such as the ability to produce one or more mogrosides in the presence of a mogroside precursor, such as mogrol.

[0147] In other embodiments, a protein can be characterized as a UGT enzyme based on the percent identity between the protein and a known UGT enzyme. For example, the protein may be at least 10%, 15%, 20%, 25%, 30%, 35%, 40%, 45%, 50%, 55%, 60%, 65%, 70%, 75%, 80%, 85%, 90%, 91%, 92%, 93%, 94%, 95%, 96%, 97%, 98%, 99%, or 100% identical, including all values in between, to any of the UGT sequences described in this application or the sequence of any other UGT enzyme. In other embodiments, a protein can be characterized as a UGT enzyme based on the presence of one or more domains in the protein that are associated with UGT enzymes. For example, in certain embodiments, a protein is characterized as a UGT enzyme based on the presence of a sugar binding domain and/or a catalytic domain, characteristic of UGT enzymes known in the art. In certain embodiments, the catalytic domain binds the substrate to be glycosylated.

[0148] In other embodiments, a protein can be characterized as a UGT enzyme based on a comparison of the three-dimensional structure of the protein compared to the three-dimensional structure of a known UGT enzyme. For example, a protein could be characterized as a UGT based on the number or position of alpha helical domains, beta-sheet domains, etc. It should be appreciated that a UGT enzyme can be a synthetic protein.

[0149] In some embodiments, the UGT does not comprise the sequence of SEQ ID NO: 109. In some embodiments, a UGT comprises less than 95%, less than 94%, less than 93%, less than 92%, less than 91%, less than 90%, less than 89%, less than 88%, less than 87%, less than 86%, less than 85%, less than 84%, less than 83%, less than 82%, less than 81%, less than 80%, less than 79%, less than 78%, less than 77%, less than 76%, less than 75%, less than 74%, less than 73%, less than 72%, less than 71%, or less than 70% identity to SEQ ID NO: 109.

### Variants

[0150] Aspects of the disclosure relate to nucleic acids encoding any of the recombinant polypeptides described, such as CDS, UGT, C11 hydroxylase, cytochrome P450 reductase, EPH, SQE, CDS, and UGT enzymes. Variants of nucleic acid or amino acid sequences described in this application are also encompassed by the present disclosure. A variant may share at least 5%, at least 10%, at least 15%, at least 20%, at least 25%, at least 30%, at least 35%, at least 40%, at least 45%, at least 50%, at least 55%, at least 60%, at least 65%, at least 70%, at least 71%, at least 72%, at least 73%, at least 74%, at least 75%, at least 76%, at least 77%, at least 78%, at least 79%, at least 80%, at least 81%, at least 82%, at least 83%, at least 84%, at least 85%, at least 86%, at least 87%, at least 88%, at least 89%, at least 90%, at least 91%, at least 92%, at least 93%, at least 94%, at least 95%, at least 96%, at least 97%, at least 98%, at least 99%, or 100% sequence identity with a reference sequence, including all values in between.

[0151] Unless otherwise noted, the term “sequence identity,” as known in the art, refers to a relationship between the sequences of two polypeptides or polynucleotides, as determined by sequence comparison (alignment). In some embodiments, sequence identity is determined across the entire length of a sequence, such as a reference sequence, while in other embodiments, sequence identity is determined over a region of a sequence. In some embodiments, sequence identity is determined over a region (e.g., a stretch of amino acids or nucleic acids, e.g., the sequence spanning an active site) of a sequence (e.g., C11 hydroxylase, cytochrome P450 reductase, EPH, SQE, UGT, or CDS sequence). For example, in some embodiments, sequence identity is determined over a region corresponding to at least 30%, at least 40%, at least 50%, at least 60%, at least 70%, at least 80%, at least 90%, at least 95%, or over 100% of the length of the reference sequence.

[0152] Identity measures the percent of identical matches between the smaller of two or more sequences with gap alignments (if any) addressed by a particular mathematical model, algorithm, or computer program.

[0153] Identity of related polypeptides or nucleic acid sequences can be readily calculated by any of the methods known to one of ordinary skill in the art. The percent identity of two sequences (e.g., nucleic acid or amino acid sequences) may, for example, be determined using the algorithm of Karlin and Altschul Proc. Natl. Acad. Sci. USA 87:2264-68, 1990, modified as in Karlin and Altschul Proc. Natl. Acad. Sci. USA 90:5873-77, 1993. Such an algorithm is incorporated into the NBLAST® and XBLAST® programs (version 2.0) of Altschul et al., J. Mol. Biol. 215:403-10, 1990. BLAST® protein searches can be performed, for example, with the XBLAST program, score=50, wordlength=3 to obtain amino acid sequences homologous to the proteins described in this application. Where gaps exist between two sequences, Gapped BLAST® can be utilized, for example, as described in Altschul et al., Nucleic Acids Res. 25(17):3389-3402, 1997. When utilizing BLAST® and Gapped BLAST® programs, the default parameters of the respective programs (e.g., XBLAST® and NBLAST®) can be used, or the parameters can be adjusted appropriately as would be understood by one of ordinary skill in the art.

[0154] Another local alignment technique which may be used, for example, is based on the Smith-Waterman algorithm (Smith, T. F. & Waterman, M. S. (1981) “Identification of common molecular subsequences.” J. Mol. Biol. 147:195-197). A general global alignment technique which may be used, for example, is the Needleman-Wunsch algorithm (Needleman, S. B. & Wunsch, C. D. (1970) “A general method applicable to the search for similarities in the amino acid sequences of two proteins.” J. Mol. Biol. 48:443-453), which is based on dynamic programming.

[0155] More recently, a Fast Optimal Global Sequence Alignment Algorithm (FOGSAA) was developed that purportedly produces global alignment of nucleic acid and amino acid sequences faster than other optimal global alignment methods, including the Needleman-Wunsch algorithm. In some embodiments, the identity of two polypeptides is determined by aligning the two amino acid sequences, calculating the number of identical amino acids, and dividing by the length of one of the amino acid sequences. In some embodiments, the identity of two nucleic acids is determined by aligning the two nucleotide sequences and calculating the number of identical nucleotide and dividing by the length of one of the nucleic acids.

[0156] For multiple sequence alignments, computer programs including Clustal Omega (Sievers et al., Mol Syst Biol. 2011 Oct. 11; 7:539) may be used.

[0157] In preferred embodiments, a sequence, including a nucleic acid or amino acid sequence, is found to have a specified percent identity to a reference sequence, such as a sequence disclosed in this application and/or recited in the claims when sequence identity is determined using the algorithm of Karlin and Altschul Proc. Natl. Acad. Sci. USA 87:2264-68, 1990, modified as in Karlin and Altschul Proc. Natl. Acad. Sci. USA 90:5873-77, 1993 (e.g., BLAST®, NBLAST®, XBLAST® or Gapped BLAST® programs, using default parameters of the respective programs).

[0158] In some embodiments, a sequence, including a nucleic acid or amino acid sequence, is found to have a specified percent identity to a reference sequence, such as a sequence disclosed in this application and/or recited in the claims when sequence identity is determined using the Smith-Waterman algorithm (Smith, T. F. & Waterman, M. S. (1981) “Identification of common molecular subsequences.” J. Mol. Biol. 147:195-197) or the Needleman-Wunsch algorithm (Needleman, S. B. & Wunsch, C. D. (1970) “A general method applicable to the search for similarities in the amino acid sequences of two proteins.” J. Mol. Biol. 48:443-453) using default parameters.

[0159] In some embodiments, a sequence, including a nucleic acid or amino acid sequence, is found to have a specified percent identity to a reference sequence, such as a sequence disclosed in this application and/or recited in the claims when sequence identity is determined using a Fast Optimal Global Sequence Alignment Algorithm (FOGSAA) using default parameters.

[0160] In some embodiments, a sequence, including a nucleic acid or amino acid sequence, is found to have a specified percent identity to a reference sequence, such as a sequence disclosed in this application and/or recited in the claims when sequence identity is determined using Clustal Omega (Sievers et al., Mol Syst Biol. 2011 Oct. 11; 7:539) using default parameters.

[0161] As used in this application, a residue (such as a nucleic acid residue or an amino acid residue) in sequence “X” is referred to as corresponding to a position or residue (such as a nucleic acid residue or an amino acid residue) “n” in a different sequence “Y” when the residue in sequence “X” is at the counterpart position of “n” in sequence “Y” when sequences X and Y are aligned using amino acid sequence alignment tools known in the art.

[0162] Variant sequences may be homologous sequences. As used in this application, homologous sequences are sequences (e.g., nucleic acid or amino acid sequences) that share a certain percent identity (e.g., at least 5%, at least 10%, at least 15%, at least 20%, at least 25%, at least 30%, at least 35%, at least 40%, at least 45%, at least 50%, at least 55%, at least 60%, at least 65%, at least 70%, at least 71%, at least 72%, at least 73%, at least 74%, at least 75%, at least 76%, at least 77%, at least 78%, at least 79%, at least 80%, at least 81%, at least 82%, at least 83%, at least 84%, at least 85%, at least 86%, at least 87%, at least 88%, at least 89%, at least 90%, at least 91%, at least 92%, at least 93%, at least 94%, at least 95%, at least 96%, at least 97%, at least 98%, at least 99%, or 100% percent identity, including all values in between). Homologous sequences include but are not limited to paralogous or orthologous sequences. Paralogous sequences arise from duplication of a gene within a genome of a species, while orthologous sequences diverge after a speciation event.

[0163] In some embodiments, a polypeptide variant (e.g., C11 hydroxylase, cytochrome P450 reductase, EPH, SQE, UGT, or CDS variant) comprises a domain that shares a secondary structure (e.g., alpha helix, beta sheet) with a reference polypeptide (e.g., a reference C11 hydroxylase, cytochrome P450 reductase, EPH, SQE, CDS, or UGT). In some embodiments, a polypeptide variant (e.g., C11 hydroxylase, cytochrome P450 reductase, EPH, SQE, CDS, or UGT variant) shares a tertiary structure with a reference polypeptide (e.g., a reference C11 hydroxylase, cytochrome P450 reductase, EPH, SQE, CDS, or UGT). As a non-limiting example, a variant polypeptide may have low primary sequence identity (e.g., less than 80%, less than 75%, less than 70%, less than 65%, less than 60%, less than 55%, less than 50%, less than 45%, less than 40%, less than 35%, less than 30%, less than 25%, less than 20%, less than 15%, less than 10%, or less than 5% sequence identity) compared to a reference polypeptide, but share one or more secondary structures (e.g., including but not limited to loops, alpha helices, or beta sheets, or have the same tertiary structure as a reference polypeptide. For example, a loop may be located between a beta sheet and an alpha helix, between two alpha helices, or between two beta sheets. Homology modeling may be used to compare two or more tertiary structures.

[0164] Mutations can be made in a nucleotide sequence by a variety of methods known to one of ordinary skill in the art. For example, mutations can be made by PCR-directed mutation, site-directed mutagenesis according to the method of Kunkel (Kunkel, Proc. Nat. Acad. Sci. U.S.A. 82: 488-492, 1985), by chemical synthesis of a gene encoding a polypeptide, by gene editing tools such as CRISPR, or by insertions, such as insertion of a tag (e.g., a HIS tag or a GFP tag). Mutations can include, for example, substitutions, deletions, and translocations, generated by any method known in the art. Methods for producing mutations may be found in references such as Molecular Cloning: A Laboratory Manual, J. Sambrook, et al., eds., Fourth Edition, Cold Spring Harbor Laboratory Press, Cold Spring Harbor, N.Y., 2012, or Current Protocols in Molecular Biology, F. M. Ausubel, et al., eds., John Wiley & Sons, Inc., New York, 2010.

[0165] In some embodiments, methods for producing variants include circular permutation (Yu and Lutz, Trends Biotechnol. 2011 Jan.; 29(1):18-25. In circular permutation, the linear primary sequence of a polypeptide can be circularized (e.g., by joining the N-terminal and C-terminal ends of the sequence) and the polypeptide can be severed (“broken”) at a different location. Thus, the linear primary sequence of the new polypeptide may have low sequence identity (e.g., less than 80%, less than 75%, less than 70%, less than 65%, less than 60%, less than 55%, less than 50%, less than 45%, less than 40%, less than 35%, less than 30%, less than 25%, less than 20%, less than 15%, less than 10%, less or less than 5%, including all values in between) as determined by linear sequence alignment methods (e.g., Clustal Omega or BLAST). Topological analysis of the two proteins, however, may reveal that the tertiary structure of the two polypeptides is similar or dissimilar. Without being bound by a particular theory, a variant polypeptide created through circular permutation of a reference polypeptide and with a similar tertiary structure as the reference polypeptide can share similar functional characteristics (e.g., enzymatic activity, enzyme kinetics, substrate specificity or product specificity). In some instances, circular permutation may alter the secondary structure, tertiary structure or quaternary structure and produce an enzyme with different functional characteristics (e.g., increased or decreased enzymatic activity, different substrate specificity, or different product specificity). See, e.g., Yu and Lutz, Trends Biotechnol. 2011 January; 29(1):18-25.

[0166] It should be appreciated that in a protein that has undergone circular permutation, the linear amino acid sequence of the protein would differ from a reference protein that has not undergone circular permutation. However, one of ordinary skill in the art would be able to readily determine which residues in the protein that has undergone circular permutation correspond to residues in the reference protein that has not undergone circular permutation by, for example, aligning the sequences and detecting conserved motifs, and/or by comparing the structures or predicted structures of the proteins, e.g., by homology modeling.

[0167] Functional variants of the recombinant C11 hydroxylases, cytochrome P450 reductases, EPHs, SQEs, CDSs, and UGTs disclosed in this application are also encompassed by the present disclosure. For example, functional variants may bind one or more of the same substrates (e.g., mogrol, mogroside, or precursors thereof) or produce one or more of the same products (e.g., mogrol, mogroside, or precursors thereof). Functional variants may be identified using any method known in the art. For example, the algorithm of Karlin and Altschul Proc. Natl. Acad. Sci. USA 87:2264-68, 1990 described above may be used to identify homologous proteins with known functions.

[0168] Putative functional variants may also be identified by searching for polypeptides with functionally annotated domains. Databases including Pfam (Sonnhammer et al., Proteins. 1997 July; 28(3):405-20) may be used to identify polypeptides with a particular domain. For example, among oxidosqualene cyclases, additional CDS enzymes may be identified in some instances by searching for polypeptides with a leucine residue corresponding to position 123 of SEQ ID NO: 74. This leucine residue has been implicated in determining the product specificity of the CDS enzyme; mutation of this residue can, for instance, result in cycloartenol or parkeol as a product (Takase et al., Org Biomol Chem. 2015 Jul. 13(26):7331-6).

[0169] Additional UGT enzymes may be identified, for example, by searching for polypeptides with a UDPGT domain (PROSITE accession number PS00375).

[0170] Homology modeling may also be used to identify amino acid residues that are amenable to mutation without affecting function. A non-limiting example of such a method may include use of position-specific scoring matrix (PSSM) and an energy minimization protocol.

[0171] Position-specific scoring matrix (PSSM) uses a position weight matrix to identify consensus sequences (e.g., motifs). PSSM can be conducted on nucleic acid or amino acid sequences. Sequences are aligned, and the method takes into account the observed frequency of a particular residue (e.g., an amino acid or a nucleotide) at a particular position and the number of sequences analyzed. See, e.g., Stormo et al., Nucleic Acids Res. 1982 May 11; 10(9):2997-3011. The likelihood of observing a particular residue at a given position can be calculated. Without being bound by a particular theory, positions in sequences with high variability may be amenable to mutation (e.g., PSSM score ≥0) to produce functional homologs.

[0172] PSSM may be paired with calculation of a Rosetta energy function, which determines the difference between the wild-type and the single-point mutant. The Rosetta energy function calculates this difference as (ΔΔG_{calc}). With the Rosetta function, the bonding interactions between a mutated residue and the surrounding atoms are used to determine whether a mutation increases or decreases protein stability. For example, a mutation that is designated as favorable by the PSSM score (e.g. PSSM score ≥0), can then be analyzed using the Rosetta energy function to determine the potential impact of the mutation on protein stability. Without being bound by a particular theory, potentially stabilizing mutations are desirable for protein engineering (e.g., production of functional homologs). In some embodiments, a potentially stabilizing mutation has a ΔΔG_{calc} value of less than −0.1 (e.g., less than −0.2, less than −0.3, less than −0.35, less than −0.4, less than −0.45, less than −0.5, less than −0.55, less than −0.6, less than −0.65, less than −0.7, less than −0.75, less than −0.8, less than −0.85, less than −0.9, less than −0.95, or less than −1.0) Rosetta energy units (R.e.uz.). See, e.g., Goldenzweig et al., Mol Cell. 2016 Jul. 21; 63(2):337-346. doi: 10.1016/j.molcel.2016.06.012.

[0173] In some embodiments, a C11 hydroxylase, cytochrome P450 reductase, EPH, SQE, CDS, or UGT coding sequence comprises a mutation at 1, 2, 3, 4, 5, 6, 7, 8, 9, 10, 11, 12, 13, 14, 15, 16, 17, 18, 19, 20, 21, 22, 23, 24, 25, 26, 27, 28, 29, 30, 31, 32, 33, 34, 35, 36, 37, 38, 39, 40, 41, 42, 43, 44, 45, 46, 47, 48, 49, 50, 51, 52, 53, 54, 55, 56, 57, 58, 59, 60, 61, 62, 63, 64, 65, 66, 67, 68, 69, 70, 71, 72, 73, 74, 75, 76, 77, 78, 79, 80, 81, 82, 83, 84, 85, 86, 87, 88, 89, 90, 91, 92, 93, 94, 95, 96, 97, 98, 99, 100 or more than 100 positions corresponding to a reference coding sequence. In some embodiments, the C11 hydroxylase, cytochrome P450 reductase, EPH, SQE, CDS, or UGT coding sequence comprises a mutation in 1, 2, 3, 4, 5, 6, 7, 8, 9, 10, 11, 12, 13, 14, 15, 16, 17, 18, 19, 20, 21, 22, 23, 24, 25, 26, 27, 28, 29, 30, 31, 32, 33, 34, 35, 36, 37, 38, 39, 40, 41, 42, 43, 44, 45, 46, 47, 48, 49, 50, 51, 52, 53, 54, 55, 56, 57, 58, 59, 60, 61, 62, 63, 64, 65, 66, 67, 68, 69, 70, 71, 72, 73, 74, 75, 76, 77, 78, 79, 80, 81, 82, 83, 84, 85, 86, 87, 88, 89, 90, 91, 92, 93, 94, 95, 96, 97, 98, 99, 100 or more codons of the coding sequence relative to a reference coding sequence. As will be understood by one of ordinary skill in the art, a mutation within a codon may or may not change the amino acid that is encoded by the codon due to degeneracy of the genetic code. In some embodiments, the one or more mutations in the coding sequence do not alter the amino acid sequence of the coding sequence relative to the amino acid sequence of a reference polypeptide.

[0174] In some embodiments, the one or more mutations in a recombinant C11 hydroxylase, cytochrome P450 reductase, EPH, SQE, CDS, or UGT sequence alter the amino acid sequence of the polypeptide relative to the amino acid sequence of a reference polypeptide. In some embodiments, the one or more mutations alter the amino acid sequence of the recombinant polypeptide relative to the amino acid sequence of a reference polypeptide and alter (enhance or reduce) an activity of the polypeptide relative to the reference polypeptide.

[0175] The activity, including specific activity, of any of the recombinant polypeptides described in this application may be measured using routine methods. As a non-limiting example, a recombinant polypeptide's activity may be determined by measuring its substrate specificity, product(s) produced, the concentration of product(s) produced, or any combination thereof. As used in this application, “specific activity” of a recombinant polypeptide refers to the amount (e.g., concentration) of a particular product produced for a given amount (e.g., concentration) of the recombinant polypeptide per unit time.

[0176] The skilled artisan will also realize that mutations in a recombinant polypeptide coding sequence may result in conservative amino acid substitutions to provide functionally equivalent variants of the foregoing polypeptides, e.g., variants that retain the activities of the polypeptides. As used in this application, a “conservative amino acid substitution” refers to an amino acid substitution that does not alter the relative charge or size characteristics or functional activity of the protein in which the amino acid substitution is made.

[0177] In some instances, an amino acid is characterized by its R group (see, e.g., Table 2). For example, an amino acid may comprise a nonpolar aliphatic R group, a positively charged R group, a negatively charged R group, a nonpolar aromatic R group, or a polar uncharged R group. Non-limiting examples of an amino acid comprising a nonpolar aliphatic R group include alanine, glycine, valine, leucine, methionine, and isoleucine. Non-limiting examples of an amino acid comprising a positively charged R group includes lysine, arginine, and histidine. Non-limiting examples of an amino acid comprising a negatively charged R group include aspartate and glutamate. Non-limiting examples of an amino acid comprising a nonpolar, aromatic R group include phenylalanine, tyrosine, and tryptophan. Non-limiting examples of an amino acid comprising a polar uncharged R group include serine, threonine, cysteine, proline, asparagine, and glutamine.

[0178] Non-limiting examples of functionally equivalent variants of polypeptides may include conservative amino acid substitutions in the amino acid sequences of proteins disclosed in this application. Conservative substitutions of amino acids include substitutions made amongst amino acids within the following groups: (a) M, I, L, V; (b) F, Y, W; (c) K, R, H; (d) A, G; (e) S, T; (f) Q, N; and (g) E, D. Additional non-limiting examples of conservative amino acid substitutions are provided in Table 2.

[0179] In some embodiments, 1, 2, 3, 4, 5, 6, 7, 8, 9, 10, 11, 12, 13, 14, 15, 16, 17, 18, 19, 20 or more than 20 residues can be changed when preparing variant polypeptides. In some embodiments, amino acids are replaced by conservative amino acid substitutions.

TABLE 2
Non-limiting examples of conservative
amino acid substitutions

| Original | R Group | Conservative Amino |
|---|---|---|
| Residue | Type | Acid Substitutions |
| Ala | nonpolar aliphatic R group | Cys, Gly, Ser |
| Arg | positively charged R group | His, Lys |
| Asn | polar uncharged R group | Asp, Gln, Glu |
| Asp | negatively charged R group | Asn, Gln, Glu |
| Cys | polar uncharged R group | Ala, Ser |
| Gln | polar uncharged R group | Asn, Asp, Glu |
| Glu | negatively charged R group | Asn, Asp, Gln |
| Gly | nonpolar aliphatic R group | Ala, Ser |
| His | positively charged R group | Arg, Tyr, Trp |
| Ile | nonpolar aliphatic R group | Leu, Met, Val |
| Leu | nonpolar aliphatic R group | Ile, Met, Val |
| Lys | positively charged R group | Arg, His |
| Met | nonpolar aliphatic R group | Ile, Leu, Phe, Val |
| Pro | polar uncharged R group | |
| Phe | nonpolar aromatic R group | Met, Trp, Tyr |
| Ser | polar uncharged R group | Ala, Gly, Thr |
| Thr | polar uncharged R group | Ala, Asn, Ser |
| Trp | nonpolar aromatic R group | His, Phe, Tyr, Met |
| Tyr | nonpolar aromatic R group | His, Phe, Trp |
| Val | nonpolar aliphatic R group | Ile, Leu, Met, Thr |

[0180] Amino acid substitutions in the amino acid sequence of a polypeptide to produce a recombinant polypeptide variant having a desired property and/or activity can be made by alteration of the coding sequence of the polypeptide. Similarly, conservative amino acid substitutions in the amino acid sequence of a polypeptide to produce functionally equivalent variants of the polypeptide typically are made by alteration of the coding sequence of the recombinant polypeptide.

### Expression of Nucleic Acids in Host Cells

[0181] Aspects of the present disclosure relate to the recombinant expression of genes encoding enzymes, functional modifications and variants thereof, as well as uses relating thereto. For example, the methods described in this application may be used to produce mogrol precursors, mogrol and/or mogrosides.

[0182] The term “heterologous” with respect to a polynucleotide, such as a polynucleotide comprising a gene, is used interchangeably with the term “exogenous” and the term “recombinant” and refers to: a polynucleotide that has been artificially supplied to a biological system; a polynucleotide that has been modified within a biological system, or a polynucleotide whose expression or regulation has been manipulated within a biological system. A heterologous polynucleotide that is introduced into or expressed in a host cell may be a polynucleotide that comes from a different organism or species from the host cell, or may be a synthetic polynucleotide, or may be a polynucleotide that is also endogenously expressed in the same organism or species as the host cell. For example, a polynucleotide that is endogenously expressed in a host cell may be considered heterologous when it is situated non-naturally in the host cell; expressed recombinantly in the host cell, either stably or transiently; modified within the host cell; selectively edited within the host cell; expressed in a copy number that differs from the naturally occurring copy number within the host cell; or expressed in a non-natural way within the host cell, such as by manipulating regulatory regions that control expression of the polynucleotide. In some embodiments, a heterologous polynucleotide is a polynucleotide that is endogenously expressed in a host cell but whose expression is driven by a promoter that does not naturally regulate expression of the polynucleotide. In other embodiments, a heterologous polynucleotide is a polynucleotide that is endogenously expressed in a host cell and whose expression is driven by a promoter that does naturally regulate expression of the polynucleotide, but the promoter or another regulatory region is modified. In some embodiments, the promoter is recombinantly activated or repressed. For example, gene-editing based techniques may be used to regulate expression of a polynucleotide, including an endogenous polynucleotide, from a promoter, including an endogenous promoter. See, e.g., Chavez et al., Nat Methods. 2016 July; 13(7): 563-567. A heterologous polynucleotide may comprise a wild-type sequence or a mutant sequence as compared with a reference polynucleotide sequence.

[0183] A nucleic acid encoding any of the recombinant polypeptides, such as C11 hydroxylases, cytochrome P450 reductases, EPHs, SQEs, CDSs, or UGTs described in this application may be incorporated into any appropriate vector through any method known in the art. For example, the vector may be an expression vector, including but not limited to a viral vector (e.g., a lentiviral, retroviral, adenoviral, or adeno-associated viral vector), any vector suitable for transient expression, any vector suitable for constitutive expression, or any vector suitable for inducible expression (e.g., a galactose-inducible or doxycycline-inducible vector).

[0184] In some embodiments, a vector replicates autonomously in the cell. A vector can contain one or more endonuclease restriction sites that are cut by a restriction endonuclease to insert and ligate a nucleic acid containing a gene described in this application to produce a recombinant vector that is able to replicate in a cell. Vectors are typically composed of DNA, although RNA vectors are also available. Cloning vectors include, but are not limited to, plasmids, fosmids, phagemids, virus genomes and artificial chromosomes. As used in this application, the terms “expression vector” or “expression construct” refer to a nucleic acid construct, generated recombinantly or synthetically, with a series of specified nucleic acid elements that permit transcription of a particular nucleic acid in a host cell such as a yeast cell. In some embodiments, the nucleic acid sequence of a gene described in this application is inserted into a cloning vector such that it is operably joined to regulatory sequences and, in some embodiments, expressed as an RNA transcript. In some embodiments, the vector contains one or more markers, such as a selectable marker as described in this application, to identify cells transformed or transfected with the recombinant vector.

[0185] In some embodiments, the nucleic acid sequence of a gene described in this application is re-coded. Re-coding may increase production of the gene product by at least 10%, at least 15%, at least 20%, at least 25%, at least 30%, at least 35%, at least 40%, at least 45%, at least 50%, at least 55%, at least 60%, at least 65%, at least 70%, at least 75%, at least 80%, at least 85%, at least 90%, at least 95%, or 100%, including all values in between) relative to a reference sequence that is not re-coded.

[0186] A coding sequence and a regulatory sequence are said to be “operably joined” when the coding sequence and the regulatory sequence are covalently linked and the expression or transcription of the coding sequence is under the influence or control of the regulatory sequence. If the coding sequence is to be translated into a functional protein, the coding sequence and the regulatory sequence are said to be operably joined if induction of a promoter in the 5′ regulatory sequence permits the coding sequence to be transcribed and if the nature of the linkage between the coding sequence and the regulatory sequence does not (1) result in the introduction of a frame-shift mutation, (2) interfere with the ability of the promoter region to direct the transcription of the coding sequence, or (3) interfere with the ability of the corresponding RNA transcript to be translated into a protein.

[0187] In some embodiments, the nucleic acid encoding any of the proteins described in this application is under the control of regulatory sequences (e.g., enhancer sequences). In some embodiments, a nucleic acid is expressed under the control of a promoter. The promoter can be a native promoter, e.g., the promoter of the gene in its endogenous context, which provides normal regulation of expression of the gene. Alternatively, a promoter can be a promoter that is different from the native promoter of the gene, e.g., the promoter is different from the promoter of the gene in its endogenous context.

[0188] In some embodiments, the promoter is a eukaryotic promoter. Non-limiting examples of eukaryotic promoters include TDH3, PGK1, PKC1, PDC1, TEF1, TEF2, RPL18B, SSA1, TDH2, PYK1, TPI1 GAL1, GAL10, GAL7, GAL3, GAL2, MET3, MET25, HXT3, HXT7, ACT1, ADH1, ADH2, CUP1-1, ENO2, pAOX1, pGAP1, and SOD1, as would be known to one of ordinary skill in the art (see, e.g., Addgene website: blog.addgene.org/plasmids-101-the-promoter-region). In some embodiments, the promoter is a prokaryotic promoter (e.g., bacteriophage or bacterial promoter). Non-limiting examples of bacteriophage promoters include Pls1con, T3, T7, SP6, and PL. Non-limiting examples of bacterial promoters include Pbad, PmgrB, Ptrc2, Plac/ara, Ptac, and Pm.

[0189] In some embodiments, the promoter is an inducible promoter. As used in this application, an “inducible promoter” is a promoter controlled by the presence or absence of a molecule. Non-limiting examples of inducible promoters include chemically regulated promoters and physically regulated promoters. For chemically regulated promoters, the transcriptional activity can be regulated by one or more compounds, such as alcohol, tetracycline, galactose, a steroid, a metal, or other compounds. For physically regulated promoters, transcriptional activity can be regulated by a phenomenon such as light or temperature. Non-limiting examples of tetracycline-regulated promoters include anhydrotetracycline (aTc)-responsive promoters and other tetracycline-responsive promoter systems (e.g., a tetracycline repressor protein (tetR), a tetracycline operator sequence (tetO) and a tetracycline transactivator fusion protein (tTA)). Non-limiting examples of steroid-regulated promoters include promoters based on the rat glucocorticoid receptor, human estrogen receptor, moth ecdysone receptors, and promoters from the steroid/retinoid/thyroid receptor superfamily. Non-limiting examples of metal-regulated promoters include promoters derived from metallothionein (proteins that bind and sequester metal ions) genes. Non-limiting examples of pathogenesis-regulated promoters include promoters induced by salicylic acid, ethylene or benzothiadiazole (BTH). Non-limiting examples of temperature/heat-inducible promoters include heat shock promoters. Non-limiting examples of light-regulated promoters include light responsive promoters from plant cells. In certain embodiments, the inducible promoter is a galactose-inducible promoter. In some embodiments, the inducible promoter is induced by one or more physiological conditions (e.g., pH, temperature, radiation, osmotic pressure, saline gradients, cell surface binding, or concentration of one or more extrinsic or intrinsic inducing agents). Non-limiting examples of an extrinsic inducer or inducing agent include amino acids and amino acid analogs, saccharides and polysaccharides, nucleic acids, protein transcriptional activators and repressors, cytokines, toxins, petroleum-based compounds, metal containing compounds, salts, ions, enzyme substrate analogs, hormones or any combination thereof.

[0190] In some embodiments, the promoter is a constitutive promoter. As used in this application, a “constitutive promoter” refers to an unregulated promoter that allows continuous transcription of a gene. Non-limiting examples of a constitutive promoter include TDH3, PGK1, PKC1, PDC1, TEF1, TEF2, RPL18B, SSA1, TDH2, PYK1, TPI1, HXT3, HXT7, ACT1, ADH1, ADH2, ENO2, pGAP1, and SOD1.

[0191] Other inducible promoters or constitutive promoters known to one of ordinary skill in the art are also contemplated.

[0192] The precise nature of the regulatory sequences needed for gene expression may vary between species or cell types, but generally include, as necessary, 5′ non-transcribed and 5′ non-translated sequences involved with the initiation of transcription and translation respectively, such as a TATA box, capping sequence, CAAT sequence, and the like. In particular, such 5′ non-transcribed regulatory sequences will include a promoter region which includes a promoter sequence for transcriptional control of the operably joined gene. Regulatory sequences may also include enhancer sequences or upstream activator sequences. The vectors disclosed in this application may include 5′ leader or signal sequences. The regulatory sequence may also include a terminator sequence. In some embodiments, a terminator sequence marks the end of a gene in DNA during transcription. The choice and design of one or more appropriate vectors suitable for inducing expression of one or more genes described in this application in a host cell is within the ability and discretion of one of ordinary skill in the art.

[0193] Expression vectors containing the necessary elements for expression are commercially available and known to one of ordinary skill in the art (see, e.g., Sambrook et al., Molecular Cloning: A Laboratory Manual, Fourth Edition, Cold Spring Harbor Laboratory Press, 2012).

[0194] In some embodiments, introduction of a nucleic acid encoding any of the recombinant polypeptides results in genomic integration of the nucleic acid. In some embodiments, a host cell comprises at least 1 copy, at least 2 copies, at least 3 copies, at least 4 copies, at least 5 copies, at least 6 copies, at least 7 copies, at least 8 copies, at least 9 copies, at least 10 copies, at least 11 copies, at least 12 copies, at least 13 copies, at least 14 copies, at least 15 copies, at least 16 copies, at least 17 copies, at least 18 copies, at least 19 copies, at least 20 copies, at least 21 copies, at least 22 copies, at least 23 copies, at least 24 copies, at least 25 copies, at least 26 copies, at least 27 copies, at least 28 copies, at least 29 copies, at least 30 copies, at least 31 copies, at least 32 copies, at least 33 copies, at least 34 copies, at least 35 copies, at least 36 copies, at least 37 copies, at least 38 copies, at least 39 copies, at least 40 copies, at least 41 copies, at least 42 copies, at least 43 copies, at least 44 copies, at least 45 copies, at least 46 copies, at least 47 copies, at least 48 copies, at least 49 copies, at least 50 copies, at least 60 copies, at least 70 copies, at least 80 copies, at least 90 copies, at least 100 copies, or more, including any values in between, of a nucleotide sequence encoding any of the recombinant polypeptides in its genome.

[0195] In some instances, a host cell comprises at least two different C11 hydroxylases, cytochrome P450 reductases, EPHs, SQEs, CDSs, or UGTs.

[0196] In some instances, a host cell comprises: an upregulated squalene synthase, an upregulated SQE, a downregulated lanosterol synthase, at least one C11 hydroxylase, at least one cytochrome P450 reductase, at least one CDS, and at least one EPH. In some instances, a host cell comprises: an upregulated SQE, at least one CDS, at least one epoxide hydrolase, at least one C11 hydroxylase, and/or at least one cytochrome P450 reductase. In some instances, a host cell comprises: an upregulated SQE, at least one CDS, at least one C11 hydroxylase, and at least one cytochrome P450 reductase. In some instances, a host cell further comprises at least one epoxide hydrolase. In some instances, a host cell comprises two different C11 hydroxylases and two different cytochrome P450 reductases. In some instances, a squalene synthase is ERG9. In some instances, a squalene epoxidase is ERG1. In some instances, a lanosterol synthase is ERG7. In some instances, a C11 hydroxylase is CYP1798. In some instances, a C11 hydroxylase is any of the C11 hydroxylases described in this application. In some instances, a C11 hydroxylase is PGA2Id23-129_CYP5491-T351M (SEQ ID NO: 305). In some instances, an epoxide hydrolase is EPH3. In some instances, an epoxide hydrolase is EPH2. In some instances, a cytochrome P450 reductase is AtCPR1. In some instances, a cytochrome P450 reductase is CPR4497. In some embodiments, a host cell comprises AtCPR1 and CPR4497. In some instances, a cytochrome P450 reductase is CPR4497. In some instances, a CDS is Siraitia CDS (sgCDS) or SEQ ID NO: 66.

[0197] In some instances, a host cell comprises: an upregulated ERG9, an upregulated ERG1; a downregulated ERG7; at least one (e.g., 1, 2, 3, 4, 5, 6, 7, 8, 9, or 10) copy of a nucleotide sequence encoding CYP1798; at least one (e.g., 1, 2, 3, 4, 5, 6, 7, 8, 9, or 10) copy of a nucleotide sequence encoding AtCPR1; at least one (e.g., 1, 2, 3, 4, 5, 6, 7, 8, 9, or 10) copy of a nucleotide sequence encoding CPR4497; at least one (e.g., 1, 2, 3, 4, 5, 6, 7, 8, 9, or 10) copy of a nucleotide sequence encoding sgCDS; at least one (e.g., 1, 2, 3, 4, 5, 6, 7, 8, 9, or 10) copy of a nucleotide sequence encoding EPH3; and/or at least one (e.g., 1, 2, 3, 4, 5, 6, 7, 8, 9, or 10) copy of a nucleotide sequence encoding atEPH2. See, e.g., Table 6, which provides non-limiting examples of CYP1798, AtCPR1, CPR4497, sgCDS, EPH3, atEPH2, ERG9, ERG1, and ERG7.

[0198] As used in this application, an “upregulated” enzyme is an enzyme whose expression is increased relative to a control. Expression of an enzyme can be upregulated using any means known to one of ordinary skill in the art. In some embodiments, expression of an enzyme is upregulated by selecting a specific promoter to control expression of the enzyme and/or by engineering the promoter of the enzyme. In some embodiments, expression of an enzyme is upregulated by expression of multiple copies of the enzyme in a host cell. In some embodiments, expression of an enzyme in a host cell is upregulated relative to a control host cell. In some embodiments, a control host cell is a host cell that does not comprise a heterologous nucleic acid encoding the enzyme. In some embodiments, a control host cell is a host cell that comprises one copy of a heterologous nucleic acid encoding the enzyme. In some embodiments, a control host cell is a host cell that comprises less copies of a heterologous nucleic acid encoding the enzyme than a control host cell in which the enzyme is upregulated. In some embodiments, a control host cell is a host cell in which expression of the enzyme is controlled by a different promoter than in the host cell in which the enzyme is upregulated. In some embodiments, expression of an enzyme is upregulated by at least 10%, at least 20%, at least 30%, at least 40%, at least 50%, at least 60%, at least 70%, at least 80%, at least 90%, at least 100%, at least 200%, at least 300%, at least 400%, at least 500%, at least 600%, at least 700%, at least 800%, at least 900%, or at least 1,000% relative to a control.

### Host Cells

[0199] Any of the proteins or enzymes of the disclosure may be expressed in a host cell. The term “host cell” refers to a cell that can be used to express a polynucleotide, such as a polynucleotide that encodes an enzyme used in production of mogrol, mogrosides, and precursors thereof.

[0200] Any suitable host cell may be used to produce any of the recombinant polypeptides, including C11 hydroxylases, cytochrome P450 reductases, EPH, SQEs, CDSs, and UGTs disclosed in this application, including eukaryotic cells or prokaryotic cells. Suitable host cells include, but are not limited to, fungal cells (e.g., yeast cells), bacterial cells (e.g., E. coli cells), algal cells, plant cells, insect cells, and animal cells, including mammalian cells. Suitable yeast host cells include, but are not limited to, Candida, Escherichia, Hansenula, Saccharomyces (e.g., S. cerevisiae), Schizosaccharomyces, Pichia, Kluyveromyces (e.g., K. lactis), and Yarrowia. In some embodiments, the yeast cell is Hansenula polymorpha, Saccharomyces cerevisiae, Saccaromyces carlsbergensis, Saccharomyces diastaticus, Saccharomyces norbensis, Saccharomyces kluyveri, Schizosaccharomyces pombe, Pichia finlandica, Pichia trehalophila, Pichia kodamae, Pichia membranaefaciens, Pichia opuntiae, Pichia thermotolerans, Pichia salictaria, Pichia quercuum, Pichia pijperi, Pichia stipitis, Pichia methanolica, Pichia angusta, Kluyveromyces lactis, Candida albicans, or Yarrowia lipolytica.

[0201] In some embodiments, the yeast strain is an industrial polyploid yeast strain. Other non-limiting examples of fungal cells include cells obtained from Aspergillus spp., Penicillium spp., Fusarium spp., Rhizopus spp., Acremonium spp., Neurospora spp., Sordaria spp., Magnaporthe spp., Allomyces spp., Ustilago spp., Botrytis spp., and Trichoderma spp.

[0202] In certain embodiments, the host cell is an algal cell such as, Chlamydomonas (e.g., C. Reinhardtii) and Phormidium (P. sp. ATCC29409).

[0203] In other embodiments, the host cell is a prokaryotic cell. Suitable prokaryotic cells include gram positive, gram negative, and gram-variable bacterial cells. The host cell may be a species of, but not limited to: Agrobacterium, Alicyclobacillus, Anabaena, Anacystis, Acinetobacter, Acidothermus, Arthrobacter, Azobacter, Bacillus, Bifidobacterium, Brevibacterium, Butyrivibrio, Buchnera, Campestris, Camplyobacter, Clostridium, Corynebacterium, Chromatium, Coprococcus, Escherichia, Enterococcus, Enterobacter, Erwinia, Fusobacterium, Faecalibacterium, Francisella, Flavobacterium, Geobacillus, Haemophilus, Helicobacter, Klebsiella, Lactobacillus, Lactococcus, Ilyobacter, Micrococcus, Microbacterium, Mesorhizobium, Methylobacterium, Methylobacterium, Mycobacterium, Neisseria, Pantoea, Pseudomonas, Prochlorococcus, Rhodobacter, Rhodopseudomonas, Rhodopseudomonas, Roseburia, Rhodospirillum, Rhodococcus, Scenedesmus, Streptomyces, Streptococcus, Synecoccus, Saccharomonospora, Saccharopolyspora, Staphylococcus, Serratia, Salmonella, Shigella, Thermoanaerobacterium, Tropheryma, Tularensis, Temecula, Thermosynechococcus, Thermococcus, Ureaplasma, Xanthomonas, Xylella, Yersinia, and Zymomonas.

[0204] In some embodiments, the bacterial host cell is of the Agrobacterium species (e.g., A. radiobacter, A. rhizogenes, A. rubi), the Arthrobacter species (e.g., A. aurescens, A. citreus, A. globformis, A. hydrocarboglutamicus, A. mysorens, A. nicotianae, A. paraffineus, A. protophonniae, A. roseoparaffinus, A. sulfureus, A. ureafaciens), or the Bacillus species (e.g., B. thuringiensis, B. anthracis, B. megaterium, B. subtilis, B. lentus, B. circulans, B. pumilus, B. lautus, B. coagulans, B. brevis, B. firmus, B. alkaophius, B. licheniformis, B. clausii, B. stearothermophilus, B. halodurans and B. amyloliquefaciens. In particular embodiments, the host cell is an industrial Bacillus strain including but not limited to B. subtilis, B. pumilus, B. licheniformis, B. megaterium, B. clausii, B. stearothermophilus and B. amyloliquefaciens. In some embodiments, the host cell is an industrial Clostridium species (e.g., C. acetobutylicum, C. tetani E88, C. lituseburense, C. saccharobutylicum, C. perfringens, C. beijerinckii). In some embodiments, the host cell is an industrial Corynebacterium species (e.g., C. glutamicum, C. acetoacidophilum). In some embodiments, the host cell is an industrial Escherichia species (e.g., E. coli). In some embodiments, the host cell is an industrial Erwinia species (e.g., E. uredovora, E. carotovora, E. ananas, E. herbicola, E. punctata, E. terreus). In some embodiments, the host cell is an industrial Pantoea species (e.g., P. citrea, P. agglomerans). In some embodiments, the host cell is an industrial Pseudomonas species, (e.g., P. putida, P. aeruginosa, P. mevalonii). In some embodiments, the host cell is an industrial Streptococcus species (e.g., S. equisimiles, S. pyogenes, S. uberis). In some embodiments, the host cell is an industrial Streptomyces species (e.g., S. ambofaciens, S. achromogenes, S. avermitilis, S. coelicolor, S. aureofaciens, S. aureus, S. fungicidicus, S. griseus, S. lividans). In some embodiments, the host cell is an industrial Zymomonas species (e.g., Z. mobilis, Z. lipolytica).

[0205] The present disclosure is also suitable for use with a variety of animal cell types, including mammalian cells, for example, human (including 293, HeLa, WI38, PER.C6 and Bowes melanoma cells), mouse (including 3T3, NS0, NS1, Sp2/0), hamster (CHO, BHK), monkey (COS, FRhL, Vero), and hybridoma cell lines.

[0206] The present disclosure is also suitable for use with a variety of plant cell types.

[0207] The term “cell,” as used in this application, may refer to a single cell or a population of cells, such as a population of cells belonging to the same cell line or strain. Use of the singular term “cell” should not be construed to refer explicitly to a single cell rather than a population of cells.

[0208] The host cell may comprise genetic modifications relative to a wild-type counterpart. As a non-limiting example, a host cell (e.g., S. cerevisiae) may be modified to reduce or inactivate one or more of the following genes: hydroxymethylglutaryl-CoA (HMG-CoA) reductase (HMG1), acetyl-CoA C-acetyltransferase (acetoacetyl-CoA thiolase) (ERG10), 3-hydroxy-3-methylglutaryl-CoA (HMG-CoA) synthase (ERG13), farnesyl-diphosphate farnesyl transferase (squalene synthase) (ERG5), may be modified to overexpress squalene epoxidase (ERG1), or may be modified to downregulate lanosterol synthase (ERG7).

[0209] Reduction of gene expression and/or gene inactivation may be achieved through any suitable method, including but not limited to deletion of the gene, introduction of a point mutation into the endogenous gene, and/or truncation of the endogenous gene. For example, polymerase chain reaction (PCR)-based methods may be used (see, e.g., Gardner et al., Methods Mol Biol. 2014; 1205:45-78) or well-known gene-editing techniques may be used. As a non-limiting example, genes may be deleted through gene replacement (e.g., with a marker, including a selection marker). A gene may also be truncated through the use of a transposon system (see, e.g., Poussu et al., Nucleic Acids Res. 2005; 33(12): e104).

[0210] A vector encoding any of the recombinant polypeptides described in this application may be introduced into a suitable host cell using any method known in the art. Non-limiting examples of yeast transformation protocols are described in Gietz et al., Yeast transformation can be conducted by the LiAc/SS Carrier DNA/PEG method. Methods Mol Biol. 2006; 313:107-20, which is incorporated by reference in its entirety. Host cells may be cultured under any conditions suitable as would be understood by one of ordinary skill in the art. For example, any media, temperature, and incubation conditions known in the art may be used. For host cells carrying an inducible vector, cells may be cultured with an appropriate inducible agent to promote expression.

[0211] Any of the cells disclosed in this application can be cultured in media of any type (rich or minimal) and any composition prior to, during, and/or after contact and/or integration of a nucleic acid. The conditions of the culture or culturing process can be optimized through routine experimentation as would be understood by one of ordinary skill in the art. In some embodiments, the selected media is supplemented with various components. In some embodiments, the concentration and amount of a supplemental component is optimized. In some embodiments, other aspects of the media and growth conditions (e.g., pH, temperature, etc.) are optimized through routine experimentation. In some embodiments, the frequency that the media is supplemented with one or more supplemental components, and the amount of time that the cell is cultured, is optimized.

[0212] Culturing of the cells described in this application can be performed in culture vessels known and used in the art. In some embodiments, an aerated reaction vessel (e.g., a stirred tank reactor) is used to culture the cells. In some embodiments, a bioreactor or fermentor is used to culture the cell. Thus, in some embodiments, the cells are used in fermentation. As used in this application, the terms “bioreactor” and “fermentor” are interchangeably used and refer to an enclosure, or partial enclosure, in which a biological, biochemical and/or chemical reaction takes place, involving a living organism, part of a living organism, or purified enzymes. A “large-scale bioreactor” or “industrial-scale bioreactor” is a bioreactor that is used to generate a product on a commercial or quasi-commercial scale. Large scale bioreactors typically have volumes in the range of liters, hundreds of liters, thousands of liters, or more.

[0213] Non-limiting examples of bioreactors include: stirred tank fermentors, bioreactors agitated by rotating mixing devices, chemostats, bioreactors agitated by shaking devices, airlift fermentors, packed-bed reactors, fixed-bed reactors, fluidized bed bioreactors, bioreactors employing wave induced agitation, centrifugal bioreactors, roller bottles, and hollow fiber bioreactors, roller apparatuses (for example benchtop, cart-mounted, and/or automated varieties), vertically-stacked plates, spinner flasks, stirring or rocking flasks, shaken multi-well plates, MD bottles, T-flasks, Roux bottles, multiple-surface tissue culture propagators, modified fermentors, and coated beads (e.g., beads coated with serum proteins, nitrocellulose, or carboxymethyl cellulose to prevent cell attachment).

[0214] In some embodiments, the bioreactor includes a cell culture system where the cell (e.g., yeast cell) is in contact with moving liquids and/or gas bubbles. In some embodiments, the cell or cell culture is grown in suspension. In other embodiments, the cell or cell culture is attached to a solid phase carrier. Non-limiting examples of a carrier system includes microcarriers (e.g., polymer spheres, microbeads, and microdisks that can be porous or non-porous), cross-linked beads (e.g., dextran) charged with specific chemical groups (e.g., tertiary amine groups), 2D microcarriers including cells trapped in nonporous polymer fibers, 3D carriers (e.g., carrier fibers, hollow fibers, multicartridge reactors, and semi-permeable membranes that can comprising porous fibers), microcarriers having reduced ion exchange capacity, encapsulation cells, capillaries, and aggregates. In some embodiments, carriers are fabricated from materials such as dextran, gelatin, glass, or cellulose.

[0215] In some embodiments, industrial-scale processes are operated in continuous, semi-continuous or non-continuous modes. Non-limiting examples of operation modes are batch, fed batch, extended batch, repetitive batch, draw/fill, rotating-wall, spinning flask, and/or perfusion mode of operation. In some embodiments, a bioreactor allows continuous or semi-continuous replenishment of the substrate stock, for example a carbohydrate source and/or continuous or semi-continuous separation of the product, from the bioreactor.

[0216] In some embodiments, the bioreactor or fermentor includes a sensor and/or a control system to measure and/or adjust reaction parameters. Non-limiting examples of reaction parameters include biological parameters (e.g., growth rate, cell size, cell number, cell density, cell type, or cell state, etc.), chemical parameters (e.g., pH, redox-potential, concentration of reaction substrate and/or product, concentration of dissolved gases, such as oxygen concentration and CO₂ concentration, nutrient concentrations, metabolite concentrations, concentration of an oligopeptide, concentration of an amino acid, concentration of a vitamin, concentration of a hormone, concentration of an additive, serum concentration, ionic strength, concentration of an ion, relative humidity, molarity, osmolarity, concentration of other chemicals, for example buffering agents, adjuvants, or reaction by-products), physical/mechanical parameters (e.g., density, conductivity, degree of agitation, pressure, and flow rate, shear stress, shear rate, viscosity, color, turbidity, light absorption, mixing rate, conversion rate, as well as thermodynamic parameters, such as temperature, light intensity/quality, etc.). Sensors to measure the parameters described in this application are well known to one of ordinary skill in the relevant mechanical and electronic arts. Control systems to adjust the parameters in a bioreactor based on the inputs from a sensor described in this application are well known to one of ordinary skill in the art in bioreactor engineering.

[0217] In some embodiments, the method involves batch fermentation (e.g., shake flask fermentation). General considerations for batch fermentation (e.g., shake flask fermentation) include the level of oxygen and glucose. For example, batch fermentation (e.g., shake flask fermentation) may be oxygen and glucose limited, so in some embodiments, the capability of a strain to perform in a well-designed fed-batch fermentation is underestimated. Also, the final product (e.g., mogrol precursor, mogrol, mogroside precursor, or mogroside) may display some differences from the substrate (e.g., mogrol precursor, mogrol, mogroside precursor, or mogroside) in terms of solubility, toxicity, cellular accumulation and secretion and in some embodiments can have different fermentation kinetics.

[0218] The methods described in this application encompass production of mogrol precursors (e.g., squalene, 2,3-oxidosqualene, or 24-25 epoxy-cucurbitadienol), mogrol, or mogrosides (e.g., MIA1, MIE1, MIIA1, MIIA2, MIIIA1, MIIE, MIII, siamenoside I, mogroside IV, isomogroside IV, MIIIE, and mogroside V) using a recombinant cell, cell lysate or isolated recombinant polypeptides, including C11 hydroxylases, cytochrome P450 reductases, EPHs, SQEs, CDSs, and UGTs.

[0219] Mogrol precursors (e.g., squalene, 2,3-oxidosqualene, or 24-25 epoxy-cucurbitadienol), mogrol, mogrosides (e.g., MIA1, MIE, MIIA1, MIIA2, MIIIA1, MIIE, MIII, siamenoside I, mogroside IV, isomogroside IV, MIIIE, and mogroside V) produced by any of the recombinant cells disclosed in this application may be identified and extracted using any method known in the art. Mass spectrometry (e.g., LC-MS, GC-MS) is a non-limiting example of a method for identification and may be used to help extract of a compound of interest.

[0220] The phraseology and terminology used in this a is for the purpose of description and should not be regarded as limiting. The use of terms such as “including,” “comprising,” “having,” “containing,” “involving,” and/or variations thereof in this application, is meant to encompass the items listed thereafter and equivalents thereof as well as additional items.

[0221] The present invention is further illustrated by the following Examples, which in no way should be construed as further limiting. The entire contents of all of the references (including literature references, issued patents, published patent applications, and co pending patent applications) cited throughout this application are hereby expressly incorporated by reference.

### EXAMPLES

### Example 1: Identification of C11 Hydroxylases for Mogrol Production

### Development of a C11 Hydroxylase Screening Library

[0222] Screening was conducted to identify C11 hydroxylases that may be useful in the production of mogrol. A library containing 1,190 proteins was screened in vivo for the target product mogrol. The library comprised variants of CYP5491 including single substitution mutations and signal recognition particle (SRP)-dependent signal peptide and transmembrane domain (TM)-CYP5491 fusions (e.g., as depicted in FIG. 2B). The library also included close homologs of CYP5491.

[0223] For the single substitution mutations targeting the active site of CYP5491, 37 residues were identified around a modeled lanosterol (FIGS. 4A-4B). Lanosterol is chemically similar to mogrol and was modeled in the active site of the CYP5491 homology model. Residues hypothesized to interact or facilitate interactions with lanosterol were chosen for scanning mutagenesis. Saturation mutagenesis of these residues was conducted. Protein stabilization mutations included single amino acid substitutions that were indicated to have a stabilizing effect by Rosetta. To identify positions to mutate for the creation of Rosetta stabilization mutations, positions were selected based on conservation in a multiple sequence alignment. Rosetta energy calculation was used to screen observed mutations in silico.

[0224] The C11 hydroxylase library plasmid structure is depicted in FIG. 2C. The promoter (˜700 bp) and terminator (˜250 bp) were used as the homology arm for genome integration.

[0225] S. cerevisiae host cells were used for the screens. The host cell base strain was engineered to express one or more copies of CYP1798, AtCPR1, CPR4497, sgCDS, EPH3, and atEPH2, as well as to upregulate expression of ERG5 and ERG1 and downregulate expression of ERG7. The base strain also had several copies of pPGK1_X_tSSA1 integrated into the genome. “X” corresponds to the F-Cph1 recognition site, which is 24 bp and has the sequence GATGCACGAGCGCAACGCTCACAA (SEQ ID NO: 415).

[0226] CYP5491 was used as a positive control for P450 screening. The control strain, shown in FIG. 3, contains multiple copies of CYP5491. The control strain also comprises a CDS, an EPH, two cytochrome P450 reductases, and an upregulated SQE. Base strains with no copies of CYP5491 were used as negative controls. P450 base strain-1 was used for the library screening.

[0227] For each candidate C11 hydroxylase to be tested, multiple copies of a nucleotide sequence encoding the candidate C11 hydroxylase were integrated into the genome of the S. cerevisiae host cell. Cells were transformed with the construct of interest using LiAc-mediated transformation.

### Screening Results

[0228] A candidate in the C11 hydroxylase screening library was considered a hit if the candidate resulted in production of mogrol that was 1.2 fold greater than the production of mogrol by the control base strain comprising wild-type CYP5491 (SEQ ID NO: 208). As shown in FIG. 5A, multiple candidates in the C11 hydroxylase screening library resulted in more than two times the mogrol production of wild-type CYP5491 (SEQ ID NO: 208). FIG. 5B shows 66 members of the library that were considered hits. 66 hits and 5 additional candidates that performed similarly to the control strain from this screen were subsequently run in another library screen with 4 replicates. The additional candidates that performed similarly to the control strain were included for assay validation. Hits from the initial screen were confirmed (see, e.g., Table 3 below).

[0229] FIG. 6 shows a comparison between the two screens. Top hits were consistent in both screens.

[0230] For the active site mutants, hits were identified at 20 unique positions, with six positions identified through at least two mutations. Mutation hotspots were identified near the active site entrance and around the heme group. In these experiments, a residue was designated a mutation hotspot if multiple different variants with substitutions at that residue showed an activity benefit. Measurement of the fold increase in mogrol production for CYP5491 active site mutants relative to wild-type CYP5491 (SEQ ID NO: 208) is shown in Table 3.

[0231] Table 4 shows the nucleic acid and amino acid sequences of signal peptides and CYP5491 fusions, as well as the fold increase in mogrol production for CYP5491 fusions relative to wild-type CYP5491 (SEQ ID NO: 208).

[0232] A CYP5491 fusion comprising a signal peptide from ERG11 was identified as a hit in the screen. The CYP5491 fusion comprised the first 25 amino acid residues from ERG11 and residues 3-473 from wild-type CYP5491. The amino acid sequence of this ERG11 N-terminal-CYP5491 fusion is provided as SEQ ID NO: 280.

TABLE 3
Mogrol production by CYP5491 mutants
relative to wild-type CYP5491

| | fold- | fold- |
|---|---|---|
| CYP5491 | increase- | increase- |
| Mutant | mean | std |
| F147L | 1.407273 | 0.049504 |
| A85S | 1.18231 | 0.055106 |
| T470E | 1.148014 | 0.044508 |
| D299A | 1.209386 | 0.022449 |
| K185H | 1.202166 | 0.039326 |
| H160E | 1.370036 | 0.018989 |
| A140P | 1.166065 | 0.027335 |
| T117G | 1.543321 | 0.038376 |
| S155A | 1.485019 | 0.063376 |
| S49A | 1.193681 | 0.35601 |
| S49F | 1.973901 | 0.499373 |
| S49H | 0.833791 | 0.202398 |
| S49I | 1.461538 | 0.50322 |
| S49M | 1.774725 | 0.128936 |
| L76I | 1.225275 | 0.114201 |
| L76V | 1.25 | 0.166264 |
| D107P | 1.104396 | 0.069356 |
| D107R | 1.108516 | 0.107705 |
| L109A | 1.512363 | 0.113439 |
| L109C | 0.861264 | 0.316093 |
| L109F | 1.313187 | 0.352249 |
| L109W | 1.934066 | 0.497103 |
| L109Y | 1.163462 | 0.294093 |
| F112T | 1.167582 | 0.141903 |
| F112W | 0.921703 | 0.219385 |
| L354V | 1.173077 | 0.399616 |
| M376A | 1.364011 | 0.30567 |
| M376C | 0.896978 | 0.493454 |
| I458P | 1.899725 | 0.193605 |
| V57A | 1.223636 | 0.066224 |
| W119R | 1.547273 | 0.077737 |
| L120H | 1.429091 | 0.075697 |
| L120N | 1.183636 | 0.041726 |
| L210S | 1.087273 | 0.120018 |
| S211N | 1.598182 | 0.052905 |
| A282V | 2.203636 | 0.189742 |
| V350F | 1.378182 | 0.073331 |
| V350I | 1.523636 | 0.151917 |
| V350L | 1.538182 | 0.053936 |
| V350M | 1.363636 | 0.034879 |
| T351L | 2.010909 | 0.042199 |
| T351M | 3.332727 | 0.037262 |
| A353G | 1.510909 | 0.085099 |
| L354I | 1.401818 | 0.07953 |
| L212F | 1.259928 | 0.058509 |
| S49L | 2.342697 | 0.181161 |

TABLE 4
Mogrol production by CYP5491 fusions relative to wild-type CYP5491

| Signal | | | Fusion | | Fold | Fold |
|---|---|---|---|---|---|---|
| Peptide | Signal Peptide | Signal Peptide | Sequence | Fusion | Improve- | Improve- |
| UniProt | AA | Nucleotide | (amino | Sequence | ment | ment |
| ID | Sequence | Sequence | acid) | (nt)* | (mean) | (st dev) |
| P40367 | SEQ ID NO: 209 | SEQ ID NO: 233 | SEQ ID | SEQ ID NO: 281 | 1.021818 | 0.044635 |
| | | | NO: 257 | | | |
| Q12438 | SEQ ID NO: 210 | SEQ ID NO: 234 | SEQ ID | SEQ ID NO: 282 | 1.452727 | 0.067803 |
| | | | NO: 258 | | | |
| P38286 | SEQ ID NO: 211 | SEQ ID NO: 235 | SEQ ID | SEQ ID NO: 283 | 1.285455 | 0.060083 |
| | | | NO: 259 | | | |
| Q04121 | SEQ ID NO: 212 | SEQ ID NO: 236 | SEQ ID | SEQ ID NO: 284 | 1.22 | 0.036303 |
| | | | NO: 260 | | | |
| P38992 | SEQ ID NO: 213 | SEQ ID NO: 237 | SEQ ID | SEQ ID NO: 285 | 1.041818 | 0.566569 |
| | | | NO: 261 | | | |
| P38954 | SEQ ID NO: 214 | SEQ ID NO: 238 | SEQ ID | SEQ ID NO: 286 | 1.158182 | 0.033262 |
| | | | NO: 262 | | | |
| Q12270 | SEQ ID NO: 215 | SEQ ID NO: 239 | SEQ ID | SEQ ID NO: 287 | 1.146209 | 0.045042 |
| | | | NO: 263 | | | |
| Pl6474 | SEQ ID NO: 216 | SEQ ID NO: 240 | SEQ ID | SEQ ID NO: 288 | 1.276173 | 0.342047 |
| | | | NO: 264 | | | |
| Q04969 | SEQ ID NO: 217 | SEQ ID NO: 241 | SEQ ID | SEQ ID NO: 289 | 1.418773 | 0.012506 |
| | | | NO: 265 | | | |
| P14359 | SEQ ID NO: 218 | SEQ ID NO: 242 | SEQ ID | SEQ ID NO: 290 | 1.052347 | 0.02156 |
| | | | NO: 266 | | | |
| P38841 | SEQ ID NO: 219 | SEQ ID NO: 243 | SEQ ID | SEQ ID NO: 291 | 1.068592 | 0.030633 |
| | | | NO: 267 | | | |
| Q07451 | SEQ ID NO: 220 | SEQ ID NO: 244 | SEQ ID | SEQ ID NO: 292 | 1.494585 | 0.050369 |
| | | | NO: 268 | | | |
| P36057 | SEQ ID NO: 221 | SEQ ID NO: 245 | SEQ ID | SEQ ID NO: 293 | 1.5 | 0.049455 |
| | | | NO: 269 | | | |
| P40071 | SEQ ID NO: 222 | SEQ ID NO: 246 | SEQ ID | SEQ ID NO: 294 | 1.236462 | 0.090445 |
| | | | NO: 270 | | | |
| P16603 | SEQ ID NO: 223 | SEQ ID NO: 247 | SEQ ID | SEQ ID NO: 295 | 1.431408 | 0.048029 |
| | | | NO: 271 | | | |
| P39704 | SEQ ID NO: 224 | SEQ ID NO: 248 | SEQ ID | SEQ ID NO: 296 | 1.588448 | 0.088035 |
| | | | NO: 272 | | | |
| Q06689 | SEQ ID NO: 225 | SEQ ID NO: 249 | SEQ ID | SEQ ID NO: 297 | 1.563177 | 0.051563 |
| | | | NO: 273 | | | |
| P53903 | SEQ ID NO: 226 | SEQ ID NO: 250 | SEQ ID | SEQ ID NO: 298 | 1.447653 | 0.068115 |
| | | | NO: 274 | | | |
| P53154 | SEQ ID NO: 227 | SEQ ID NO: 251 | SEQ ID | SEQ ID NO: 299 | 1.268953 | 0.109876 |
| | | | NO: 275 | | | |
| P38626 | SEQ ID NO: 228 | SEQ ID NO: 252 | SEQ ID | SEQ ID NO: 300 | 1.234657 | 0.033866 |
| | | | NO: 276 | | | |
| P38353 | SEQ ID NO: 229 | SEQ ID NO: 253 | SEQ ID | SEQ ID NO: 301 | 1.602996 | 0.130317 |
| | | | NO: 277 | | | |
| P38310 | SEQ ID NO: 230 | SEQ ID NO: 254 | SEQ ID | SEQ ID NO: 302 | 1.617978 | 0.112276 |
| | | | NO: 278 | | | |
| P53045 | SEQ ID NO: 231 | SEQ ID NO: 255 | SEQ ID | SEQ ID NO: 303 | 1.473783 | 0.247408 |
| | | | NO: 279 | | | |
| P10614 | SEQ ID NO: 232 | SEQ ID NO: 256 | SEQ ID | SEQ ID NO: 304 | 1.081044 | 0.051225 |
| | | | NO: 280 | | | |

*Nucleotide sequences (nt) further comprise a stop codon (“taa”) at the end of each sequence, which is not shown.

### Example 2. Production and Characterization of Mutant CYP5491 Fusions

[0233] Signal peptide and point mutation strategies were combined to determine whether mutant CYP5491 fusions had increased C11 hydroxylase activity relative to wild-type CYP5491 fusions and mutant CYP5491 proteins alone. In the C11 hydroxylase screen described in Example 1, >80% of the hits were from active site single mutants and signal peptide optimization designs. The top two signal peptide fusions and the top three point mutations were combined to generate six new mutant fusions. Each mutant fusion was tested separately in the base host cell strain described in Example 1. Multiple copies of each mutant fusion were integrated into the genome of the host cell strain. The amino acid and nucleotide sequences of the mutant CYP5491 fusions are shown in Table 5 below. In Table 5, signal peptide “|P53903|PGA2|Processing of GAS1 and ALP protein 2|d23-129” denotes that the signal peptide of PGA2 (residues 1-22 of PGA2 (UniprotKB Accession No. P53903) was used in the fusion, while signal peptide “|Q07451|YET3|Endoplasmic reticulum transmembrane protein 3|d7-203” denotes that the signal peptide of YET3 (residues 1-6 of YET3 (UniprotKB Accession No. Q07451)) was used in the fusion. The amino acid substitution in the “Fusion” column of Table 5 denotes the amino acid substitution at a residue corresponding to the indicated amino acid in wild-type CYP5491 (SEQ ID NO: 208).

[0234] FIG. 7 shows that the signal peptide of PGA2 or YET3 further improved the activity of a CYP5491 protein that contained the point mutation T351M.

[0235] Since the C11 hydroxylase base strain-3 had a higher flux to mogrol than base strain-1, base strain-2, or a control strain, the C11 hydroxylase base strain-3 was used to determine if the point mutations or signal peptides changed the specificity of CYP5491. As shown in FIG. 8, the point mutation T351M increased the ratio of mogrol/oxo mogrol, indicating that the point mutation T351M results in improved activity and specificity to produce mogrol.

[0236] A mutant P450 fusion comprising PGA2 d 23-129/YET3 d 7-203 signal peptides with T351M in the background of base strain-3 produced mogrol titers that were about two times higher than a plasmid-bearing control strain in a 96-well plate assay. The control strain comprises a CDS, two EPHs, a C11-hydroxylase, two cytochrome P450 reductases, and an upregulated SQE.

### Example 3: Combining Recombinant Proteins to Produce a Mogrol Precursor, Mogrol, or a Mogroside

[0237] The recombinant proteins of the present disclosure are used in combination to produce a mogrol precursor, (e.g., 2-3-oxidosqualene, 2,3,22,23-dioxidosqualene, cucurbitadienol, 24, 25-expoxycucurbitadienol, 24,25-dihydroxycucurbitadienol), mogrol, or mogrosides (e.g., mogroside I-A1 (MIA1), mogroside I-E (MIE), mogroside II-A1 (MIIA1), mogroside III-A1 (MIIIA1), mogroside II-E (MIIE), mogroside III (MIII), siamenoside I, mogroside IV, mogroside III-E (MIIIE), mogroside V, and mogroside VI).

[0238] For example, to produce mogrol, genes encoding enzymes such as an SQE, a CDS, an EPH and a C11 hydroxylase are expressed in yeast cells. In some instances, a cytochrome P450 reductase is also expressed in the yeast cells. Non-limiting examples of suitable SQEs, EPHs, C11 hydroxylases and cytochrome P450 reductases are provided in Tables 4-7. Non-limiting examples of CDSs are provided in Table 8. Mogrol can be quantified using LC-MS. UGTs are further expressed in the yeast cells to produce mogrosides. Non-limiting examples of UGTs are provided in Table 9.

[0239] Alternatively, the recombinant proteins are purified from host cells and the mogrol is produced outside of the host cells. The recombinant proteins are added either sequentially or simultaneously to a reaction buffer comprising squalene.

### Example 4: Nucleic Acid and Protein Sequences Associated with the Disclosure

TABLE 5
Amino acid and nucleotide sequences
of mutant CYP5491 fusions

| | Amino Acid | Nucleotide |
|---|---|---|
| Fusion | Sequence | Sequence |
| signal peptide \| P53903 | SEQ ID | SEQ ID |
| \| PGA2 \| Processing of | NO: 305 | NO: 311 |
| GAS1 and ALP protein | | |
| 2 \| d23-129 \| T351M | | |
| signal peptide \| P53903 | SEQ ID | SEQ ID |
| \| PGA2 \| Processing of | NO: 306 | NO: 312 |
| GAS1 and ALP protein | | |
| 2 \| d23-129 \| S49L | | |
| signal peptide \| P53903 | SEQ ID | SEQ ID |
| \| PGA2 \| Processing of | NO: 307 | NO: 313 |
| GAS1 and ALP protein | | |
| 2 \| d23-129 \| S49F | | |
| signal peptide \| Q07451 | SEQ ID | SEQ ID |
| \| YET3 \| Endoplasmic | NO: 308 | NO: 314 |
| reticulum | | |
| transmembrane protein | | |
| 3 \| d7-203 \| T351M | | |
| signal peptide \| Q07451 | SEQ ID | SEQ ID |
| \| YET3 \| Endoplasmic | NO: 309 | NO: 315 |
| reticulum | | |
| transmembrane protein | | |
| 3 \| d7-203 \| S49L | | |
| signal peptide \| Q07451 | SEQ ID | SEQ ID |
| \| YET3 \| Endoplasmic | NO: 310 | NO: 316 |
| reticulum | | |
| transmembrane protein | | |
| 3 \| d7-203 \| S49F | | |

TABLE 6
Sequences of additional enzymes
associated with the disclosure

| | | Amino acid |
|---|---|---|
| Name | DNA sequences | sequences |
| CYP1798 | SEQ ID NO: 397 | SEQ ID NO: 406 |
| AtCPR1 | SEQ ID NO: 398 | SEQ ID NO: 407 |
| CPR4497 | SEQ ID NO: 399 | SEQ ID NO: 408 |
| sgCDS | SEQ ID NO: 400 | SEQ ID NO: 409 |
| EPH3 | SEQ ID NO: 401 | SEQ ID NO: 410 |
| atEPH2 | SEQ ID NO: 402 | SEQ ID NO: 411 |
| ERG9 | SEQ ID NO: 403 | SEQ ID NO: 412 |
| ERG1 | SEQ ID NO: 404 | SEQ ID NO: 413 |
| ERG7 | SEQ ID NO: 405 | SEQ ID NO: 414 |

TABLE 7
Additional C11 hydroxylase (P450), cytochrome
P450 reductase, EPH, and SQE sequences

| | Nucleotide | Amino Acid |
|---|---|---|
| Enzyme | Sequence | Sequence |
| C11 hydroxylase | SEQ ID NO: 113 | SEQ ID NO: 129 |
| C11 hydroxylase | SEQ ID NO: 114 | SEQ ID NO: 130 |
| (cucurbitadienol | | |
| oxidase) | | |
| Cytochrome P450 | SEQ ID NO: 115 | SEQ ID NO: 131 |
| reductase | | |
| Cytochrome P450 | SEQ ID NO: 116 | SEQ ID NO: 132 |
| reductase | | |
| Epoxide hydrolase | SEQ ID NO: 117 | SEQ ID NO: 133 |
| Epoxide hydrolase | SEQ ID NO: 118 | SEQ ID NO: 134 |
| Epoxide hydrolase | SEQ ID NO: 119 | SEQ ID NO: 135 |
| (epoxide hydratase) | | |
| Epoxide hydrolase | SEQ ID NO: 120 | SEQ ID NO: 136 |
| (epoxide hydratase) | | |
| Epoxide hydrolase | SEQ ID NO: 121 | SEQ ID NO: 137 |
| (epoxide hydratase) | | |
| Epoxide hydrolase | SEQ ID NO: 122 | SEQ ID NO: 138 |
| (epoxide hydratase) | | |
| Epoxide hydrolase | SEQ ID NO: 123 | SEQ ID NO: 139 |
| (epoxide hydratase) | | |
| Epoxide hydrolase | SEQ ID NO: 124 | SEQ ID NO: 140 |
| (epoxide hydratase) | | |
| Epoxide hydrolase | SEQ ID NO: 125 | SEQ ID NO: 141 |
| (epoxide hydratase) | | |
| Squalene epoxidase | SEQ ID NO: 126 | SEQ ID NO: 142 |
| Squalene epoxidase | SEQ ID NO: 127 | SEQ ID NO: 143 |
| Squalene epoxidase | SEQ ID NO: 128 | SEQ ID NO: 144 |

TABLE 8
Non-limiting examples of CDS sequences

| | Nucleotide | Amino Acid |
|---|---|---|
| Name | Sequence | Sequence |
| A0A0K9RW03_m | SEQ ID NO: 1 | SEQ ID NO: 41 |
| AquAgaCDS1_m | SEQ ID NO: 2 | SEQ ID NO: 42 |
| AquAgaCDS16 | SEQ ID NO: 3 | SEQ ID NO: 43 |
| AquAgaCDS6 | SEQ ID NO: 4 | SEQ ID NO: 44 |
| BenHisCDS2_m | SEQ ID NO: 5 | SEQ ID NO: 45 |
| A0A0D3QY32 | SEQ ID NO: 6 | SEQ ID NO: 46 |
| A0A0D3QXV2 | SEQ ID NO: 7 | SEQ ID NO: 47 |
| CmaCh17G013880.1 | SEQ ID NO: 8 | SEQ ID NO: 48 |
| A0A1S3CBF6 | SEQ ID NO: 9 | SEQ ID NO: 49 |
| CocGraCDS4 | SEQ ID NO: 10 | SEQ ID NO: 50 |
| CocGraCDS6_m | SEQ ID NO: 11 | SEQ ID NO: 51 |
| CSPI06G07180.1 | SEQ ID NO: 12 | SEQ ID NO: 52 |
| CucFoeCDS | SEQ ID NO: 13 | SEQ ID NO: 53 |
| CucMelMakCDS5 | SEQ ID NO: 14 | SEQ ID NO: 54 |
| CucMetCDS | SEQ ID NO: 15 | SEQ ID NO: 55 |
| CucPepOviCDS1_m | SEQ ID NO: 16 | SEQ ID NO: 56 |
| CucPepOviCDS2 | SEQ ID NO: 17 | SEQ ID NO: 57 |
| CucPepOviCDS3 | SEQ ID NO: 18 | SEQ ID NO: 58 |
| CucPepOviCDS3_m | SEQ ID NO: 19 | SEQ ID NO: 59 |
| Cucsa.349060.1 | SEQ ID NO: 20 | SEQ ID NO: 60 |
| F6GYI4 | SEQ ID NO: 21 | SEQ ID NO: 61 |
| GynCarCDS1 | SEQ ID NO: 22 | SEQ ID NO: 62 |
| GynCarCDS4 | SEQ ID NO: 23 | SEQ ID NO: 63 |
| K7NBZ9 | SEQ ID NO: 24 | SEQ ID NO: 64 |
| LagSicCDS2 | SEQ ID NO: 25 | SEQ ID NO: 65 |
| Lus10014538.g_m | SEQ ID NO: 26 | SEQ ID NO: 66 |
| Lus10032146.g_m | SEQ ID NO: 27 | SEQ ID NO: 67 |
| MomChaCDS2 | SEQ ID NO: 28 | SEQ ID NO: 68 |
| MomChaCDS4 | SEQ ID NO: 29 | SEQ ID NO: 69 |
| O23909_PEA_Y118L | SEQ ID NO: 30 | SEQ ID NO: 70 |
| Q6BE24 | SEQ ID NO: 31 | SEQ ID NO: 71 |
| SecEduCDS | SEQ ID NO: 32 | SEQ ID NO: 72 |
| SgCDS1 | SEQ ID NO: 33 | SEQ ID NO: 73 |
| SgCDS_Scer1 | SEQ ID NO: 34 | SEQ ID NO: 74 |
| TriKirCDS10 | SEQ ID NO: 35 | SEQ ID NO: 75 |
| TriKirCDS4 | SEQ ID NO: 36 | SEQ ID NO: 76 |
| XP_006340479.1 | SEQ ID NO: 37 | SEQ ID NO: 77 |
| XP_008655662.1 | SEQ ID NO: 38 | SEQ ID NO: 78 |
| XP_010541955.1_m | SEQ ID NO: 39 | SEQ ID NO: 79 |
| XP_016688836.1_m | SEQ ID NO: 40 | SEQ ID NO: 80 |

TABLE 9
Non-limiting examples of UGT sequences

| | Nucleotide | Amino acid |
|---|---|---|
| UGT name | sequence | sequence |
| | SEQ ID NO: 81 | SEQ ID NO: 97 |
| | SEQ ID NO: 82 | SEQ ID NO: 98 |
| UGT1697 | SEQ ID NO: 83 | SEQ ID NO: 99 |
| UGT720-269-4 | SEQ ID NO: 84 | SEQ ID NO: 100 |
| Q6VAA9_STERE | SEQ ID NO: 85 | SEQ ID NO: 101 |
| (Ntrunc(3) H49D L130W | | |
| P151K I159M V198L | | |
| A304T L421S A492T) | | |
| (D45H W126L K147P | | |
| M155I L194V T300A | | |
| S417L T488A) | | |
| U73C5_ARATH | SEQ ID NO: 86 | SEQ ID NO: 102 |
| U73C6_ARATH | SEQ ID NO: 87 | SEQ ID NO: 103 |
| UGT73-251.5 | SEQ ID NO: 88 | SEQ ID NO: 104 |
| UGT430 | SEQ ID NO: 89 | SEQ ID NO: 105 |
| Q6VAB4_STERE | SEQ ID NO: 90 | SEQ ID NO: 106 |
| | SEQ ID NO: 91 | SEQ ID NO: 107 |
| Q6VAA4_STERE | SEQ ID NO: 92 | SEQ ID NO: 108 |
| UGT94-289-1 | SEQ ID NO: 93 | SEQ ID NO: 109 |
| | SEQ ID NO: 94 | SEQ ID NO: 110 |
| | SEQ ID NO: 95 | SEQ ID NO: 111 |
| | SEQ ID NO: 96 | SEQ ID NO: 112 |

### EQUIVALENTS

[0241] Those skilled in the art will recognize, or be able to ascertain using no more than routine experimentation, many equivalents to the specific embodiments of the invention described in this application. Such equivalents are intended to be encompassed by the following claims.

[0242] All references, including patent documents, disclosed in this application are incorporated by reference in their entirety, particularly for the disclosure referenced in this application.

[0243] It should be appreciated that sequences disclosed in this application may or may not contain secretion signals. The sequences disclosed in this application encompass versions with or without secretion signals. It should also be understood that protein sequences disclosed in this application may be depicted with or without a start codon (M). The sequences disclosed in this application encompass versions with or without start codons. Accordingly, in some instances amino acid numbering may correspond to protein sequences containing a start codon, while in other instances, amino acid numbering may correspond to protein sequences that do not contain a start codon. It should also be understood that sequences disclosed in this application may be depicted with or without a stop codon. The sequences disclosed in this application encompass versions with or without stop codons. Aspects of the disclosure encompass host cells comprising any of the sequences described in this application and fragments thereof.

What is claimed is:

1. A host cell that expresses a C11 hydroxylase fusion protein, wherein the C11 hydroxylase fusion protein comprises:
a) a signal sequence that comprises
(i) a sequence selected from SEQ ID NO: 226, SEQ ID NO: 220 or SEQ ID NOs: 209-219, 221-225, or 227-232; or
(ii) a sequence that has no more than two amino acid substitutions, deletions, or insertions relative to a sequence selected from SEQ ID NO: 226, SEQ ID NO: 220, or SEQ ID NOs: 209-219, 221-225, or 227-232; and
b) a sequence comprising a transmembrane domain and a catalytic domain of a C11 hydroxylase enzyme.

2. The host cell of claim 1, wherein the signal sequence comprises a sequence selected from SEQ ID NO: 226, SEQ ID NO: 220, or SEQ ID NOs: 209-219, 221-225, or 227-232.

3. The host cell of claim 1 or 2, wherein the sequence in (b) comprises a sequence that is at least 90% identical to wild-type CYP5491 (SEQ ID NO: 208).

4. The host cell of any one of claims 1-3, wherein the transmembrane domain of the C11 hydroxylase enzyme comprises residues that correspond to residues 2-28 of wild-type CYP5491 (SEQ ID NO: 208).

5. The host cell of any one of claims 1-4, wherein the sequence comprising the catalytic domain of the C11 hydroxylase enzyme comprises an amino acid substitution, deletion, or insertion in the catalytic domain relative to the catalytic domain of wild-type CYP5491 (residues 29-473 of SEQ ID NO: 208).

6. The host cell of claim 5, wherein the amino acid substitution, deletion, or insertion is located in the substrate binding domain of the C11 hydroxylase enzyme.

7. The host cell of claim 6, wherein the amino acid substitution, deletion, or insertion is located in a loop that binds a heme group.

8. The host cell of any one of claims 1-7, wherein relative to the sequence of wild-type CYP5491 (SEQ ID NO: 208), the C11 hydroxylase enzyme comprises an amino acid substitution at a residue corresponding to residues: S49; V57; L76; A85; D107; L109; F112; T117; W119; L120; A140; F147; S155; H160; K185; L210; S211; L212; A282; D299; V350; T351; A353; L354; M376; I458; and/or T470 in CYP5491.

9. The host cell of claim 8, wherein the C11 hydroxylase enzyme comprises:
a) A, F, H, I, M, or L at the residue corresponding to S49 of wild-type CYP5491 (SEQ ID NO: 208);
b) A at the residue corresponding to V57 of wild-type CYP5491 (SEQ ID NO: 208);
c) I or V at the residue corresponding to L76 of wild-type CYP5491 (SEQ ID NO: 208);
d) S at the residue corresponding to A85 of wild-type CYP5491 (SEQ ID NO: 208);
e) P or R at the residue corresponding to D107 of wild-type CYP5491 (SEQ ID NO: 208);
f) A, C, F, W, or Y at the residue corresponding to L109 of wild-type CYP5491 (SEQ ID NO: 208);
g) T or W at the residue corresponding to F112 of wild-type CYP5491 (SEQ ID NO: 208);
h) G at the residue corresponding to T117 of wild-type CYP5491 (SEQ ID NO: 208);
i) R at the residue corresponding to W119 of wild-type CYP5491 (SEQ ID NO: 208);
j) H or N at the residue corresponding to L120 of wild-type CYP5491 (SEQ ID NO: 208);
k) P at the residue corresponding to A140 of wild-type CYP5491 (SEQ ID NO: 208);
l) L at the residue corresponding to F147 of wild-type CYP5491 (SEQ ID NO: 208);
m) A at the residue corresponding to S155 of wild-type CYP5491 (SEQ ID NO: 208);
n) E at the residue corresponding to H160 of wild-type CYP5491 (SEQ ID NO: 208);
o) H at the residue corresponding to K185 of wild-type CYP5491 (SEQ ID NO: 208);
p) S at the residue corresponding to L210 of wild-type CYP5491 (SEQ ID NO: 208);
q) N at the residue corresponding to S211 of wild-type CYP5491 (SEQ ID NO: 208);
r) F at the residue corresponding to L212 of wild-type CYP5491 (SEQ ID NO: 208);
s) V at the residue corresponding to A282 of wild-type CYP5491 (SEQ ID NO: 208);
t) A at the residue corresponding to D299 of wild-type CYP5491 (SEQ ID NO: 208);
u) F, I, L, or M at the residue corresponding to V350 of wild-type CYP5491 (SEQ ID NO: 208);
v) L or M at the residue corresponding to T351 of wild-type CYP5491 (SEQ ID NO: 208);
w) G at the residue corresponding to A353 of wild-type CYP5491 (SEQ ID NO: 208);
x) V or I at the residue corresponding to L354 of wild-type CYP5491 (SEQ ID NO: 208);
y) A or C at the residue corresponding to M376 of wild-type CYP5491 (SEQ ID NO: 208);
z) P at the residue corresponding to I458 of wild-type CYP5491 (SEQ ID NO: 208); and/or
aa) E at the residue corresponding to T470 of wild-type CYP5491 (SEQ ID NO: 208).

10. The host cell of any one of claims 1-9, wherein the host cell further comprises an upregulated squalene epoxidase, at least one cytochrome P450 reductase, at least one cucurbitadienol synthase (CDS), and/or at least one epoxide hydrolase (EPH).

11. The host cell of claim 10, wherein the host cell comprises an upregulated squalene synthase, a downregulated lanosterol synthase, at least one other C11 hydroxylase, and/or at least two cytochrome P450 reductases.

12. The host cell of any one of claims 1-11, wherein a nucleotide sequence encoding the C11 hydroxylase fusion protein is integrated into the genome of the host cell.

13. The host cell of any one of claims 1-12, wherein a nucleotide sequence encoding the C11 hydroxylase fusion protein is expressed on a plasmid.

14. The host cell of claim 12, wherein multiple copies of a nucleotide sequence encoding the C11 hydroxylase fusion protein are integrated into the genome of the host cell.

15. The host cell of any one of claims 10-14, wherein at least one nucleotide sequence encoding the squalene synthase, the squalene epoxidase, the at least one other C11 hydroxylase, the at least one cytochrome P450 reductase, the at least one CDS, and/or the at least one EPH is integrated into the genome of the host cell.

16. The host cell of any one of claims 10-15, wherein the host cell produces mogrol.

17. The host cell of any one of claims 10-16, wherein the host cell produces at least 1.1 fold more mogrol compared to a control host cell, wherein the control host cell comprises wild-type CYP5491.

18. The host cell of claim 16 or 17, wherein the host cell is capable of being cultured in cell culture media that is substantially free of one or more mogrol precursors that are not produced by the host cell.

19. The host cell of any one of claims 16-18, wherein the host cell is capable of producing a ratio of mogrol/11-oxomogrol that is greater than 2.

20. The host cell of any one of claims 17-19, wherein the C11 hydroxylase fusion protein comprises a sequence that is at least 90% identical to a sequence selected from SEQ ID NO: 305 or 308, SEQ ID NOs: 257-280, or SEQ ID NOs: 306-307, or SEQ ID NOs: 309-310.

21. A host cell that comprises a C11 hydroxylase enzyme, wherein the C11 hydroxylase enzyme is at least 90% identical to wild-type CYP5491 (SEQ ID NO: 208) and comprises an amino acid substitution at one or more residues corresponding to residues: S49; V57; L76; A85; D107; L109; F112; T117; W119; L120; A140; F147; S155; H160; K185; L210; S211; L212; A282; D299; V350; T351; A353; L354; M376; I458; and/or T470 in CYP5491.

22. The host cell of claim 21, wherein the C11 hydroxylase enzyme comprises:
a) A, F, H, I, M, or L at the residue corresponding to S49 of wild-type CYP5491 (SEQ ID NO: 208);
b) A at the residue corresponding to V57 of wild-type CYP5491 (SEQ ID NO: 208);
c) I or V at the residue corresponding to L76 of wild-type CYP5491 (SEQ ID NO: 208);
d) S at the residue corresponding to A85 of wild-type CYP5491 (SEQ ID NO: 208);
e) P or R at the residue corresponding to D107 of wild-type CYP5491 (SEQ ID NO: 208);
f) A, C, F, W, or Y at the residue corresponding to L109 of wild-type CYP5491 (SEQ ID NO: 208);
g) T or W at the residue corresponding to F112 of wild-type CYP5491 (SEQ ID NO: 208);
h) G at the residue corresponding to T117 of wild-type CYP5491 (SEQ ID NO: 208);
i) R at the residue corresponding to W119 of wild-type CYP5491 (SEQ ID NO: 208);
j) H or N at the residue corresponding to L120 of wild-type CYP5491 (SEQ ID NO: 208);
k) P at the residue corresponding to A140 of wild-type CYP5491 (SEQ ID NO: 208);
l) L at the residue corresponding to F147 of wild-type CYP5491 (SEQ ID NO: 208);
m) A at the residue corresponding to S155 of wild-type CYP5491 (SEQ ID NO: 208);
n) E at the residue corresponding to H160 of wild-type CYP5491 (SEQ ID NO: 208);
o) H at the residue corresponding to K185 of wild-type CYP5491 (SEQ ID NO: 208);
p) S at the residue corresponding to L210 of wild-type CYP5491 (SEQ ID NO: 208);
q) N at the residue corresponding to S211 of wild-type CYP5491 (SEQ ID NO: 208);
r) F at the residue corresponding to L212 of wild-type CYP5491 (SEQ ID NO: 208);
s) V at the residue corresponding to A282 of wild-type CYP5491 (SEQ ID NO: 208);
t) A at the residue corresponding to D299 of wild-type CYP5491 (SEQ ID NO: 208);
u) F, I, L, or M at the residue corresponding to V350 of wild-type CYP5491 (SEQ ID NO: 208);
v) L or M at the residue corresponding to T351 of wild-type CYP5491 (SEQ ID NO: 208);
w) G at the residue corresponding to A353 of wild-type CYP5491 (SEQ ID NO: 208);
x) V or I at the residue corresponding to L354 of wild-type CYP5491 (SEQ ID NO: 208);
y) A or C at the residue corresponding to M376 of wild-type CYP5491 (SEQ ID NO: 208);
z) P at the residue corresponding to I458 of wild-type CYP5491 (SEQ ID NO: 208); and/or
aa) E at the residue corresponding to T470 of wild-type CYP5491 (SEQ ID NO: 208).

23. The host cell of claim 22, wherein the C11 hydroxylase enzyme comprises:
a) a phenylalanine (F) or leucine (L) at a residue corresponding to S49 in wild-type CYP5491 (SEQ ID NO: 208); and/or
b) a methionine (M) at a residue corresponding to T351 in wild-type CYP5491 (SEQ ID NO: 208).

24. The host cell of any one of claims 21-23, wherein the C11 hydroxylase enzyme is expressed as a C11 hydroxylase fusion protein that comprises a signal sequence that is at least 90% identical to a sequence selected from SEQ ID NO: 226, SEQ ID NO: 220 or SEQ ID NOs: 209-219, 221-225, or 227-232.

25. The host cell of claim 24, wherein the signal sequence comprises a sequence selected from SEQ ID NO: 226, SEQ ID NO: 220 or SEQ ID NOs: 209-219, 221-225, or 227-232.

26. The host cell of any one of claims 21-25, wherein the host cell further comprises an upregulated squalene epoxidase, at least one cytochrome P450 reductase, at least one cucurbitadienol synthase (CDS), and/or at least one epoxide hydrolase (EPH).

27. The host cell of claim 26, wherein the host cell comprises an upregulated squalene synthase, a downregulated lanosterol synthase, at least one other C11 hydroxylase, and/or at least two cytochrome P450 reductases.

28. The host cell of any one of claims 21-27, wherein a nucleotide sequence encoding the C11 hydroxylase enzyme is integrated into the genome of the host cell or a nucleotide sequence encoding the C11 hydroxylase enzyme is expressed on a plasmid.

29. The host cell of claim 28, wherein multiple copies of a nucleotide sequence encoding the C11 hydroxylase enzyme are integrated into the genome of the host cell.

30. The host cell of any one of claims 27-29, wherein at least one nucleotide sequence encoding the squalene synthase, the squalene epoxidase, the at least one other C11 hydroxylase, the at least one cytochrome P450 reductase, the at least one CDS, and/or the at least one EPH is integrated into the genome of the host cell.

31. The host cell of any one of claims 26-30, wherein the host cell produces mogrol.

32. The host cell of any one of claims 26-31, wherein the host cell produces 1.1 fold more mogrol compared to a control host cell, wherein the control host cell comprises wild-type CYP5491.

33. The host cell of any one of claims 26-32, wherein the host cell is capable of being cultured in cell culture media that is substantially free of one or more mogrol precursors that are not produced by the host cell.

34. The host cell of any one of claims 31-33, wherein the host cell is capable of producing a ratio of mogrol/11-oxomogrol that is greater than 2.

35. A method of producing mogrol comprising culturing the host cell of any one of claims 1-34.

36. The method of claim 35, wherein the host cell is cultured in the presence of a mogrol precursor selected from squalene, 2-3-oxidosqualene, cucurbitadienol, 2-3, 22,23-diepoxysqualene, 24, 25 epoxy-cucurbitadienol, and 24, 25 dihydroxy cucurbitadienol.

37. The method of claim 35, wherein the host cell is cultured in media that is substantially free of one or more mogrol precursors that are not produced by the host cell.

38. A host cell that comprises a C11 hydroxylase fusion protein, wherein the C11 hydroxylase fusion protein comprises the signal sequence of ERG11 and a sequence encoding a transmembrane domain and a catalytic domain of a C11 hydroxylase enzyme.

39. The host cell of claim 38, wherein the C11 hydroxylase fusion protein comprises residues 3-504 of wild-type CYP5491 (SEQ ID NO: 208).

40. The host cell of claim 38 or 39, wherein the C11 hydroxylase fusion protein comprises a sequence that is at least 90% identical to SEQ ID NO: 280.

41. A C11 hydroxylase fusion protein, wherein the fusion protein comprises:
a) a signal sequence that is at least 90% identical to a sequence selected from SEQ ID NO: 226, SEQ ID NO: 220 or SEQ ID NOs: 209-219, 221-225, or 227-232, and a sequence encoding a transmembrane domain and a catalytic domain of a C11 hydroxylase enzyme; or
b) the first 25 amino acids of ERG11, and a sequence encoding a transmembrane domain and a catalytic domain of a C11 hydroxylase enzyme.

42. A method of producing mogrol comprising contacting a C11 hydroxylase enzyme with:
(a) 24, 25 dihydroxy cucurbitadienol, thereby producing mogrol;
(b) cucurbitadienol, thereby producing 11-hydroxycucurbitadienol; and/or
(c) 24,25-epoxy cucurbitadienol, thereby producing, 11-hydroxy-24,25-epoxycucurbitadienol,
wherein the C11 hydroxylase enzyme is at least 90% identical to SEQ ID NO: 208 and comprises at least one amino acid substitution relative to SEQ ID NO: 208.

43. The method of claim 42, wherein relative to the sequence of wild-type CYP5491 (SEQ ID NO: 208), the C11 hydroxylase enzyme comprises an amino acid substitution at a residue corresponding to residues: S49; V57; L76; A85; D107; L109; F112; T117; W119; L120; A140; F147; S155; H160; K185; L210; S211; L212; A282; D299; V350; T351; A353; L354; M376; I458; and/or T470 in wild-type CYP5491 (SEQ ID NO: 208).

44. The host cell of claim 42 or 43, wherein the C11 hydroxylase enzyme comprises:
a) A, F, H, I, M, or L at the residue corresponding to S49 in wild-type CYP5491 (SEQ ID NO: 208);
b) A at the residue corresponding to V57 in wild-type CYP5491 (SEQ ID NO: 208);
c) I or V at the residue corresponding to L76 in wild-type CYP5491 (SEQ ID NO: 208);
d) S at the residue corresponding to A85 in wild-type CYP5491 (SEQ ID NO: 208);
e) P or R at the residue corresponding to D107 in wild-type CYP5491 (SEQ ID NO: 208);
f) A, C, F, W, or Y at the residue corresponding to L109 in wild-type CYP5491 (SEQ ID NO: 208);
g) T or W at the residue corresponding to F112 in wild-type CYP5491 (SEQ ID NO: 208);
h) G at the residue corresponding to T117 in wild-type CYP5491 (SEQ ID NO: 208);
i) R at the residue corresponding to W119 in wild-type CYP5491 (SEQ ID NO: 208);
j) H or N at the residue corresponding to L120 in wild-type CYP5491 (SEQ ID NO: 208);
k) P at the residue corresponding to A140 in wild-type CYP5491 (SEQ ID NO: 208);
l) L at the residue corresponding to F147 in wild-type CYP5491 (SEQ ID NO: 208);
m) A at the residue corresponding to S155 in wild-type CYP5491 (SEQ ID NO: 208);
n) E at the residue corresponding to H160 in wild-type CYP5491 (SEQ ID NO: 208);
o) H at the residue corresponding to K185 in wild-type CYP5491 (SEQ ID NO: 208);
p) S at the residue corresponding to L210 in wild-type CYP5491 (SEQ ID NO: 208);
q) N at the residue corresponding to S211 in wild-type CYP5491 (SEQ ID NO: 208);
r) F at the residue corresponding to L212 in wild-type CYP5491 (SEQ ID NO: 208);
s) V at the residue corresponding to A282 in wild-type CYP5491 (SEQ ID NO: 208);
t) A at the residue corresponding to D299 in wild-type CYP5491 (SEQ ID NO: 208);
u) F, I, L, or M at the residue corresponding to V350 in wild-type CYP5491 (SEQ ID NO: 208);
v) L or M at the residue corresponding to T351 in wild-type CYP5491 (SEQ ID NO: 208);
w) G at the residue corresponding to A353 in wild-type CYP5491 (SEQ ID NO: 208);
x) V or I at the residue corresponding to L354 in wild-type CYP5491 (SEQ ID NO: 208);
y) A or C at the residue corresponding to M376 in wild-type CYP5491 (SEQ ID NO: 208);
z) P at the residue corresponding to I458 in wild-type CYP5491 (SEQ ID NO: 208); and/or
aa) E at the residue corresponding to T470 in wild-type CYP5491 (SEQ ID NO: 208).

45. The method of any one of claims 42-44, wherein the C11 hydroxylase enzyme is a purified protein.

46. A host cell that comprises a C11 hydroxylase fusion protein, wherein the C11 hydroxylase fusion protein comprises:
a) the signal sequence of KAR2, NCP1, ERP2, RBD2, SNA3, SPC2, NHX1, PGA2, GRX6, YLR413W, YJL062W, MSC2, EMCS, CHO2, IFA38, SUR2, IPT1, YET3, YPL162C, ERG11, SRP102, GUP1, CBR1, or YHR138C; and
b) a sequence encoding a transmembrane domain and a catalytic domain of a C11 hydroxylase enzyme.

47. A host cell that comprises a C11 hydroxylase fusion protein, wherein the C11 hydroxylase fusion protein is at least 90% identical to any one of SEQ ID NO: 305 or 308, SEQ ID NOs: 257-280, or SEQ ID NOs: 306-307, or SEQ ID NOs: 309-310.

48. The host cell of claim 47, wherein the C11 hydroxylase fusion protein is at least 98% identical to any one of SEQ ID NO: 305 or 308, SEQ ID NOs: 257-280, or SEQ ID NOs: 306-307, or SEQ ID NOs: 309-310.

49. The host cell of claim 47 or 48, wherein the C11 hydroxylase fusion protein is at least 99% identical to any one of SEQ ID NO: 305 or 308, SEQ ID NOs: 257-280, or SEQ ID NOs: 306-307, or SEQ ID NOs: 309-310.

50. The host cell of any one of claims 47-49, wherein the C11 hydroxylase fusion protein comprises any one of SEQ ID NO: 305 or 308, SEQ ID NOs: 257-280, or SEQ ID NOs: 306-307, or SEQ ID NOs: 309-310.

51. The host cell of claim 50, wherein the sequence is PGA2Id23-129_CYP5491-T351M (SEQ ID NO: 305).

52. A method comprising culturing the host cell of any one of claims 46-51.

53. The host cell of any one of claims 1-20, wherein the catalytic domain of the C11 hydroxylase enzyme comprises residues that correspond to residues 29-473 of wild-type CYP5491 (SEQ ID NO: 208).

The application's sequence listing, which the Patent Office published only in electronic form, follows.

SEQUENCE LISTING (415 sequences)

SEQ ID NO: 1 - DNA, 2271 bp, Artificial Sequence
  Synthetic
atgtggagattgaagattgcagaaggtggatccccatggttacgtaccacaaataaccatgttggtagacaaatctgggagttcgaccctaacttgggtactccagaacagataagagaagtcgaagaggctagagaaaacttttggaaaaatagattcgaacaaaagcactcttcagatttattgatgcgtatgcaatttgcccaagaaaactcttccaatgttgtcttgccacaagttaaggtcaaagatgaagacgaaattactaaggaagctgttaaatctaccttggaaagagctttatctttctactccgccgtccagacttcagacggtaactgggcttctgatttgggtggtcctatgtttttattgccaggtttggttatcgctttgtccgtcactggtgccttaaacgctgttttgtctaaggagcaccaaaaggaaatgtgcagatatttatacaaccatcaaaataaggatggtggttggggtttgcacattgagggtcactcaaccatgttcggtaccgttttgacatatgtcactttgagattgttgggtgaaggtgttgatgacggtgatggtgctatggaaagaggtagaaaatggacattagaacatggttccgcaactgctatcacctcttggggtaagatgtggttgtctgttttgggagtcttcgaatgggctggtaataatccaatgccaccagaaacctggttattgccatacatcttaccagtccaccctggtcgtatgtggtgtcattgtagaatggtttacttgcctatgtcatacttgtacggtaaaagatttgttggtccaattactccaacagttttatctttaagaagagaattgttcgacgttccatatcacgagatcgattgggaccgtgccagaaacgaatgtgctaaggaagatttatactatcctcacccattggtccaagacattttgtgggcctccttacataaggccgtcgagcctatattgatgagatggccaggtaaaaagttgcgtgaaaaggctttgtctactgtcatggaacacatacactacgaagacgaaaacaccagatatatttgtttgggtccagttaataaggtcttgaacttgttgtgctgttgggttgaagatccttattctgatgctttcaagttacatttgcaacgtgttcatgactacttgtgggttgccgaagacggtatgaagatgcaaggttacaacggttcccaattgtgggacactgctttttctatccaggctattttagcaaccaacttaggtgaggaatatggtggtacattgagaaaagcacacaatttcatcaaggattcacaaattcaagaagattgtccaggtgacccaaacgtttggtttagacatatccataagggtgcttggccattttccactcgtgatcacggttggttaatttcagactgcactgctgaaggtttgaaagcatccttgatgttatctaaattaccatccacaatggtcggtgaaccattggaagttaacagattgtgtgatgctgttaacgtcttgttgtctttacaaaatgataatggtggtttcgcctcatacgaattgaccagatcttacccatggttggaattgataaaccctgctgagactttcggtgacatcgtcattgactacccatacgttgaatgtacctctgcaactatggaagccttgaccttgttcaagaagttgcatcctggtcacagaaccaaggagatcgataactgcattaaaaaggctgctaaatttttggagaagatgcaaagagctgacggttcctggtatggttgttggggtgtctgttttacttatgcaggatggttcggtataaaaggtttggttgccgctggtagaacttacaattcctgtttggctattcgtaaggcttgcgaatttttgttatctaaggaattaccaggtggtggttggggtgaatcttacttatcctgtcaaaacaaggtctatactaatttggaaggtaataagcctcatttggttaacactgcctgggttttaatggctttgattgaagccggtcaggctaagagagatccaatgccattacacagagctgctaaagttttgatcaactctcaaatgccaaacggtgatttccctcagcaagaaattatgggtgtttttaaccgtaattgtatgatcacctatgctgcttacagaaatattttcccaacctgggctttgggtgaatacagaactcaagtcttacaaaagtaa

SEQ ID NO: 2 - DNA, 2286 bp, Artificial Sequence
  Synthetic
atgtggcgtttaaaaacaggttctgaaaccgtcggggataacggtagatggttgagatcaactaataaccacgttggtagacaagtttgggagttctttcctgaaatgggttccccagaagaattggtcgctatcgaagccgctcatagagaatttcacttgaatagattccataagcagcactcttccgacttattgatgcgtttgcaatatgagagagaaaagccatgtgttcaaaaggaaggtgcagttagattggacgctactgaaaccccaactgaagccgctgtcgaaaccacattaagacgtgctttaactttctactctaccatgcaatcagatgacggtaactgggcctctgatttgggtggtcctatgtttttgttgccaggtttagttatagctttgtacgtcactggtgtcttgaactccgttttgtccaaagaacatcaaagagaaattagaagatatttatacaatcaccaaaaccaagatggtggttggggtttacacatcgagggtccatctactatgttcggttctgctttgaactacgttaccttgcgtttattgggtgaaggtccagatgacggtgaaggtgcaatggaaagagccagacaatggattttatctcgtggtggtgcagttgctgttacctcctggggtaagttgtggttgtcagtcttgggggtctatgagtgggacggtaacaatcctttgccaccagaattgtggttgttaccatactctttgcctttacatccaggtagaatgtggtgccattgtagaatggtttacttgccaatgtcctatttatacggtaagagattcgttggtcctattactccaactgttttatctttgagagaggaattgtacccaatcccttatcaccatgttgactggaacaaagctagaaacacctgtgctcaggatgatttgtactacccacacccattcgtccaggacttattgtggggttctttatatcacgtctacgaaccattggttatgagatggccaggtaagagattgcgtgaaagagccttgcaacacgtcatgaagcatattcattacgaggatgaaaattctcgttacatctgtttgggtccagttaataaagctttaaacatgttatgctgttgggtcgaagacccacactctgaagcttttaagatgcatataccaagaatttatgactatttgtggatcgccgaagatggtatgagaatgcaaggttataatggttcccaattgtgggatactgctttttccgtccaagctattgtcgccactaagttgacagacgaattttcagagaccttagcaaaggctaacaaatacatcttggatgcccaaattttgaaaaactgtcctggtgatccaaatgtttggttcagacacatccacaagggtgcttggccattctctacaagagaccatggttggttgatctcagattgcactgctgaaggtttgaaggcatccttaatgttgtcaaaattaccttctaagattgttggtgaaccattagagaaaaacagattgtacgacgctgttaacgttttgttgtcattacaaaacgaaaatggtggttttgcttcttatgaattgacaagatcctacccatggttggaattgatcaatccagccgagaccttcggtgatattgttatagattatacctacgttgaatgtacctctgctacaatggaagctttaactttattcaagaagttacacccaggtcatcgtaagaaggaaattgaaagatgtatggctaacgctgccaaattcttggaaatgagacaagaggcagacgggtcttggtacggttgctggggtgtctgttacacatatgctggttggttcggtattaagggtttggttgcagctggtagaacttacaataattgtgcaaacatcagaagagcttgcgactttttgttgtcaaagcagttgccaaatggtggttggggtgagtcctacttgtcctgtcaaaacaaattatacactaacttgaacaatgacagaatgcacaccgtcaacaccgcctgggctatgatggccttgattgaagctggtcaagctaagactgatcctatgccattgcaccatgctgcacgtaccttgattaacgctcaaatggaaactggtgactttcctcaacaagaaataatgggtgtttttaataagaactgtatgatcacttatgctgcctatagaaacgttttcccagtctgggctttaggtgaataccaccaccgtgttttgaacggttgttaa

SEQ ID NO: 3 - DNA, 2286 bp, Artificial Sequence
  Synthetic
atgtggcgtctgaagacaggctctgagactgttggtgacaacggtagatggttacgcagtaccaataaccatgtcggaaggcaagtatgggaatttttccctgaaatgggttcccccgaagaacttgttgctattgaagccgcacacagagaatttcacctaaaccgtttccataaacagcactcttcagatttgctcatgagattacaatacgagagagaaaagccatgcgtccaaaaagaaggtgctgtgagattggatgctacggagactccaaccgaagcggctgtcgaaactacattgcgtagagccttgaccttctatagcactatgcaatctgacgatggtcactgggctaatgacttgggtggcccaatgtttcttttgccaggtttggttataaccttaactatcactggtacgattaacgttgttttatccaaggaacatcaaagagaaatcagacggtacctatataaccaccagaatcaagatggtggttggggtttgcatatcgaaggaccatcgaccatgttcggtagcgcgttgaactacgttacgttgaggctcctgggggagggtcctgacgacggtgaaggagctatggagagagccagacaatggattctgtccagaggtggtgctgtcgctgtaacctcttggggtaagttatggttgtcagttttgggtgtgtacgaatgggatggtaataacccgttgccaccggagctttggcttctaccttactctttaccattgcacccaggtcgaatgtggtgtcactgtagaatggtctatttgccaatgtcgtacttgtacggtaagagattcgtcggtcctattactccaactgttctttccttaagagaagaactctacccaatcccctatcatcatgtcgattggaacaaagctagaaatacatgtgcacaagacgacttgtattatccacacccatttgttcaagatctgctgtggggttctttgtaccacgtttatgaaccattagttatgagatggcccgggaagagattgcgagaaagagccttacagcacgtgatgaaacatatacactacgaagatgaaaacaccgaatacatttgtttaggaccagtgaataaggcattgaacatgttgtgttgctgggttgaagaccctcattctgaagctttcaagatgcacattccgcggatctatgattacctgtggatcgctgaagacggcatgaaaatgcaaggttacaacggcagtcaattgtgggatactgccttcgccgtccaagctatcgttgctacaaagttgactgacgaattttccgaaaccttggccaaagctaataagtacattttggacgctcaaatactgaagaactgtccaggtgatcctaatgtatggtacagacatattactaagggggcttggtctttttctaccgcggatcaaggttggcttgtttcagactgtaccgctgaaggtttgaaggcattattgttgtactctatgctcccacaccagaaagccccatccagcatcgaaaagaaccgtctttatgatgctgtaaacgttttactatctatgcaaaacgctgatggtggtttcgcttccttcgaacttacgcgtagttatccatggttggaaatgattaacccagccgaaacattcggtgacatagtcatcgattacacttacgtcgaatgtacctctgctgtgattcaagcattggctttgttcaagagattgcacccgggacacagaaagaaggaaatagagaggtgtatggctaacgcagctaaatttttggagatgagacaagaagccgatggctcatggtatggttgctggggtgtttgttatacatacgccggttggtttggtatcaaaggtctaacctcctgtggtagaacttacaataattgcgccaacattagaagagcttgcgactttttattgtcgaaacaactgccaaatggtggttggggcgagtcctacttgagctgtcaaaacaagttgtacaccaatttgaacaacgaccgtatgcacactgtcaatactgcttgggctatgatggcgttaattgaagctggtcaagccaagactgacccaatgcccctacatcatgctgctagaaccctaattaatgcacagatggagaccggcgactttccccaacaagaaatcatgggtgttttcaataagaattgtatgatctcttacgccggttatagaaacgttttcccagtatgggctttaggcgaataccatcacagagtgttgaacggttgttaa

SEQ ID NO: 4 - DNA, 2226 bp, Artificial Sequence
  Synthetic
atgtggcgtttgaagatcgcagagggtaaagaaggtccttacttaaagtcaacaaacaattttgttggaagacagacctgggaatttgacccagatgccggtactccagaagaaagagctgctgtcgaagaagccagacgtgctttctattctaacagatacagagttaaaccaccagctgatttgttatggagattgcaattcatgagagagaagaatttcaagcaaattattcctatggtcagaatcaaggacggtgaagctataactcacgaaaaagcaaccgccactttgagaagagccgttcatttcttgactgtcttacaatccatcgacggtcactggccagctgagaacgctggttgccattactttttgccaccattagttttttgtttgtatattacaggtcacttgtcttccgttttctctcaagaacatcaaagagaaattttgcgttacatctataatcaccaaaacgaagatggtggttggggtttacacatcgaaggtcactctattatgttctccaccgctttgtcttacatatgtttgcgtattttgggtgaaggtttagaaggtggtcaggacaacgcttgtgctaaggctcaaaaatggattttagatcatggttcagttactcacataccttcctggggtaagacctggttgtctgtcttgggtttgttcgattggtccggttcaaatccaatcccaccagaattttggatgttaccatcttttttacctattcatccaggtaagatttggtcatactgccgtactacatatatgccaatgtcctacttgtatggaaagaagttcgtcgctcctatcaccccattgattatccaattaagaaaagagttgtacttgcaaccatacgacgaaataaactggagaaaggttagacatttgtgtgcaaaggaagatttgtattacccacacccagttattcaagatttaatgtgggactgtttatacgtcttcactgaacctttgttgaatcgttggccattgaacaagatgatcagagaaaaagccttgaaggttaccatgaaccatattcactacgaagatgagaactcttcttatatcaatatggcttgtgtcggtaaagttttgtgtaccttggcttgctgggttgaagacccaaacggtgactacttcaaaaagcacttggccagaatcccagattacatttgggtcgctgaagatggtatgactatgcaaggtttggcctctcaaacttgggactccggtttagctatccaagcattgtttgcctccaacttgatagatgaaattggtccaactttaaagagagctcatgatttcatcaagaagtctcaagttttagacaatccttttggtgactttaaaaagatgttcagacactcctctaagggttcatggaccttctcagtcagagatcacggttggcctgtttctgactgtacagctgaaggtttgaaatgctgtttgttgttgtctatgttaccacaagagattgttggtgaaaagttagaagttgagagattgcatgatgctgtcaatatcattttccacttacaatccaagaacggtggtgtcgccgcatgggaacctgttagagcatccaaatggttggaattgttgaatccaatcgaatttttggaagatatagttgtcgaccatgagtatttagaatgtaccgcttcttctatagacgctttacagttatttaagaaattataccctacttgtgagcgtgaagaaattgaaaacttcatcttgaaggctgttgaatatatcgaaaacattcagatgtctgatggttcttggtatggtaactggggtgtctgcttcatctacggtacattgttcgctttgaagggtttagctaaggcaggtaagacttatgacgattgtgtcgctatgagaaaaggagttgattttttgttaagaatccaaagagacgatggtggttggggagagtcatacaagtcctgtccaaataaaaagtttgaaccattgcagagagaaggttccaacgtcgtccaaactgcttgggccattttaggtttgattgagtctcgtcaaattatgagagacccaaccccattgcacagagcaataaagttcatcatcaactctcaattagaagatggtgactttccacaacaggttagaggtttgtcctacatttattcatctttgtcctttttgccagttattaagatgtaa

SEQ ID NO: 5 - DNA, 2301 bp, Artificial Sequence
  Synthetic
atgtggcgtttaaagatcggtgccgacaccgtcttgacagatccatcaaatgcaggaggtagatggttgtctactttatccaaccatttgggtagacaggtttgggaattttgtgctgagttgggttctcctgaagacttgcaacaaatacaacacgctagacaaagattctccgatcacagattcgaaaaaaagcattctactgacttattgatgcgtatgcaatttgctaaggaaaactcatctttcgttaatttgccacaaattaaagtcaaggataaggaggatgttaccgaagaagccgtcactagaactttgaaaagagctattaacttctattctaccatccaggcacacgacggtaactgggcttccgacttaggtggtccaatgtttttgttgcctggtttagttattgctttgtacgttacaggtgttttgaactccgtcttgtctaccgaacatcaaagagaaatctgccgttacttatataatcaccaaaacagagatggtggatggggtttgcatatcgagggtccatctactatgtttggttccgtcttgaactacgttactttaagattattgggtgaagaagccgaagacggtcaaggtggtgtcgataaggctagaaagtggattttagatcacggtggtgctaccgccataacatcatggggtaagatgtggttgtctgttttaggtgtttacgaatgggcaggtaataatccattgccaccagaattgtggttgttaccatacttgttgccttgtcatccaggtagaatgtggtgtcactgtagaatggtctatttgccaatgtgttacttgtatggtaagcgtttcgttggtcctattacaccaattatcagatccttgagaaaagagttgtacttagttccttatcacgaagttgactggaacgtcgctagaaaccaatgcgctaaagaagatttgtactatccacatccattagtccaggatgtcttatgggcctctttgcatcacgtttacgaaccattgttcatgtgttggcctgctaagagattgagagagaaggcattaagaactgttatgcaacacatacactacgaagatgaaaattctcgttacatctgtttgggtccagtcaacaaagtcttgaacatgttgtgctgttgggttgaagacccacattccgaggctttcaagttgcatattcctcgtttgtatgactacttatggattgctgaagacggtatgagaatgcagggttacaatggatcacaattatgggatactgccttttctgtccaagctatcatgtctaccaaattgtcagaagaatacggtaccactttgagaaaggcccacaagtatattcaagattcacaagttcaagaagattgcccaggtgatccaaatgtttggtttagacatatacacaaaggtgcttggccattctccactagagaccatggttggttgatctctgactgtacagctgagggtttgaaggcctctttgatgttatctaagttgccttccaagatcgttggtgaaccattagaaaaggaaagattgtatgacgctgttaacgttttgttgtcattgcaaaacgaaaacggtggtttcgcctcctacgagttgaccagatcttatccatggttggaattaattaacccagctgaaaccttcggtgatattgttatagactacccatacgttgaatgtacttccgctgcaatccaggctttggctgcctttaagaaattgtacccaggtcacagatctaatgaaattggtaactctatagctaaagccgctgacttcattgaatcaatccaagcaacagatggttcttggtacggttcttggggtgtctgtttcacctacgctggttggtttggtattaagggtttagtcgctgctggtagaacttacaattcctgctcctctttgagaaaggcttgtgatttcttaatgtccaaggaattggcagccggtggttggggtgagtcctacttgtcctgtcaagataaggtttataccaacatcaaagatgatagaccacatttggtcaacactggttgggctatgttgtcattaatcgacgctggtcaagctgaaagagatcctacaccattgcaccgtgctgccagaatattgattaattcccaaatggaagacggtgactttccacaggaagagatcatgggtgttttcaacaagaattgtatgattacttatgcagcttatagaaacatctttccaatttgggcattaggtgaataccgttgcagagtcttacaagcctcttaa

SEQ ID NO: 6 - DNA, 2292 bp, Artificial Sequence
  Synthetic
atgtggaggctcaaagttggggcagaaagtgtaggagagaaggaagaaaaatggctaaagtccatatctaaccacttgggccgacaagtgtgggaattttgtgcgcatcagcctaccgcttcgccgaatcatcttcaacagattgacaatgcccgcaaccatttccgtaataatagatttcacagaaaacaatcatctgatttattcttagctatccaaaacgagaaggaaattgcaaatgtcacaaaaggtggtggtattaaagttaaggaggaagaggatgtcagaaaagaaacggtaaagaacactgttgaaagggccttgagcttttactcagctatacaaactaatgacggaaattgggcaagtgatctaggcggtccaatgttcctgttgccaggactggtaatcgctctatatgttacaggtgttttaaattccgtgttgagcaagcatcacagacaggagatgtgccggtatttatacaaccatcaaaacgaagatgggggatggggtctgcatatcgaagggacttcgaccatgtttggttctgcccttaattatgtggccttgagattattaggcgaggatgcggacggtggcgaaggcggtgctatgacaaaagcacgtagctggattctggatcgtggtggggcaacggctataacttcttggggaaaattgtggctttcagtgttaggagtctatgaatggtccggtaacaaccctttgcccccagaattttggctcttaccctactgtcttcctttccacccaggccggatgtggtgtcattgcagaatggtatatctaccgatgtcgtacttatatggtaaaaggtttgttggaccaatcacgcctatagtcttgagtttaaggaaggaactttatacaattccctaccatgaaatcgattggaatagatctcgaaatacttgcgctaaagaagacttgtactatccacatccgaagatgcaagatattttgtggggctcaatttatcacctgtatgaacctcttttcaccagatggcctggcaaacgcttaagggagaaagcactccaaatggctatgaagcacatacactacgaggatgaaaactctcgatatatatgtctcggtccagttaacaaagtcttaaatatgctatgttgttgggtggaggacccatacagtgacgcattcaaatttcatttgcaaagagttcctgattacctatgggtagcggaagatggaatgagaatgcagggttataatggctcccagctgtgggatacagcgttttctgtacaagccattatttcaactaaacttatagattcttttggtaccacattaaaaaaggcccatgatttcgttaaagactctcaaatccaacaagactgccctggggatccaaacgtctggttcagacatattcataagggggcttggcccttttccacccgggatcacggttggctaatttcagattgtacggctgaaggtttgaaggctagcttaatgctaagtaagttgcctagtaagattgtcggagaacccctcgaaaaatcgcgtttatgcgacgccgttaatgttctgttatcgttgcagaatgagaacggcggttttgcaagctacgaactcacgaggtcctatccatggctcgaactaatcaatccagctgagacatttggagatatagtgatagactatccgtatgtcgaatgtacctcagcaactatggaagcattgaccctcttcaaaaaacttcatccgggtcatagaactaaagaaattgacatcgcagttgctagagcggccaatttccttgaaaatatgcaaagaaccgacggttcatggtatgggtgctggggcgtatgttttacttacgctggatggttcggtataaaaggtttagtcgcagcgggtagaacatataatagttgtgtagctattcggaaagcctgtgattttttactttctaaggaattgcccggagggggttggggcgagtcctacttatcctgccagaacaaagtttatactaaccttgaaggcaatcgtcctcatctggttaacactgcatgggtgctgatggccttgatagaagctggccaggctgagcgtgatccagcaccattgcatcgtgcagcgaggttgttgattaattcgcaactagagaatggtgatttcccacaagaagaaataatgggagtgtttaacaagaactgtatgattacatacgctgcttaccgcaatattttcccgatctgggcactaggagagtattttcacagggtattaacagag

SEQ ID NO: 7 - DNA, 2292 bp, Artificial Sequence
  Synthetic
atgtggaggctcaaagttggggcagaaagtgtaggagagaaggaagaaaaatggctaaagtccatatctaaccacttgggccgacaagtgtgggaattttgtgcggaccagcctaccgcttcgccgaatcatcttcaacagattgataatgcccgcaaacatttccgtaacaatagatttcacagaaagcaatcatctgatttattcttagctatccaaaatgagaaagaaattgcaaacggtacaaaaggtggtggaattaaggtcaaagaggaagaggacgttagaaaggaaacggtgaaaaacactgttgaaagggccttgagcttttactcagctatacaaactaatgatggcaattgggcaagtgatctaggtggaccaatgttcctgttgccaggtctggtcatcgctctatatgtaacaggcgttttaaattccgtattgagcaagcatcatagacaggagatgtgccggtatttatacaatcaccaaaacgaagacgggggttggggactgcatatcgaagggacttcgaccatgtttggttctgcccttaattatgtggccttgagattattaggcgaggatgcggatggtggcgaaggtggtgctatgacaaaggcacgtgggtggattctggaccgtggaggggcaacggctataacttcttggggtaaattgtggctttcggtattaggagtttatgaatggtcaggcaacaaccctttgcccccagaattttggctcttaccctactgtcttcctttccacccaggtcggatgtggtgtcattgcagaatggtgtatctaccgatgtcatacttatatggtaaaaggtttgttggaccaatcacgcctatagtcttgtccttaaggaaggaactttatacaattccctaccatgaaatcgattggaacaaatctcgcaatacgtgtgctaaagaggatctatattatccacaccccaaaatgcaagatattttgtggggcagtatttaccatttatatgaacctctgttcactagatggccaggaaaacgcctgagagaaaaggcattgcagatggctatgaagcatatacactacgaagacgagaatagtagatacatttgcttgggtcctgtgaataaagttctgaacatgttgtgttgttgggtagaggatccgtacagtgacgcgtttaaattccatttacaaagagttccagactacctatggatagcagaagatgggatgagaatgcaaggttataatggctcgcagctatgggacacagctttttcagtccaagcaattatctctactaagctgattgattcttttggcaccactttgaaaaaggcacatgatttcgttaaagattctcagattcaacaggattttccaggtgacccgaatgtctggttccgacacatccacaagggtgcctggcccttttcaacccgagatcatggctggttgatatccgattgtacagccgaagggttaaaggcgagccttatgttaagcaagttaccttcgaaaattgtaggtgaaccattagaaaaaagtagactatgcgatgcagttaacgttcttttatcactacaaaatgaaaacgggggctttgctagctacgagttaaccaggtcatatccatggttggaattaataaaccctgccgaaacgttcggagacattgtgattgattatccatacgtagagtgtacctccgcaactatggaggctcttactctttttaagaaattacacccaggtcatcgtacaaaagagattgatacagcggtcgccaaggctgctaatttcctcgaaaatatgcaaagaaccgatggaagttggtacggatgctggggtgtctgttttacttatgccggttggtttgggattaagggtttggttgccgcagggcgcacatattccacttgcgtcgccatcagaaaagcttgtgatttcttgttgtcaaaagaattaccaggcggtggatggggtgaatcttatctatcttgtcaaaacaaagtctatactaatctcgaaggtaataggcctcatttggtgaatacagcttgggttctgatggccctcatcgaggctggtcaagcggaaagagatcccgcaccactacatcgtgctgcaaggctcttgatcaattcacaattagagaacggtgattttccgcaggaagaaatcatgggtgtattcaacaagaactgcatgataacctacgccgcttataggaatatttttcctatatgggctcttggagagtactttcatagagtgctaactgag

SEQ ID NO: 8 - DNA, 2295 bp, Artificial Sequence
  Synthetic
atgtggcgtttgaaggttggtgccgagtctgtcggcgaaaaagatgaaaagtgggttaaatccgtctcaaaccacttaggtagacaagtttgggaattttgcgcagacgctgccgctgatacccctcatcagttgttgcaaatccaaaatgctagaaaccacttccatcacaatagattccatagaaagcaatcttccgacttatttttggctattcaatacgaaaaggagattgctaagggtgccaaaggtggtgctgttaaggtcaaagaaggtgaagaagttggtaaggaagccgtcaagtctactttagagcgtgctttgggtttctattctgctgttcagacatcagacggtaactgggcttctgatttaggtggtccaatgtttttgttgccaggtttggttatcgcattacacgtcactggtgttttgaactccgtcttgtccaagcaccatagagttgaaatgtgtagatacttgtacaaccatcaaaatgaagatggtggttggggtttgcacatagaaggtacctctactatgttcggttctgctttgaattatgttgccttgagattgttaggtgaagacgcagacggtggtgatggtggcgctatgaccaaggctagagcatggatattagagagaggtggtgctacagctatcacttcatggggtaagttgtggttgtccgtcttaggtgtttacgaatggtccggtaacaacccattaccaccagaattttggttattgccttattctttgccattccatcctggtagaatgtggtgtcactgtagaatggtctacttaccaatgtcttatttgtacggtaagcgtttcgttggtccaattactccaaaagtcttgtctttgagacaagagttgtacaccattccatatcacgaaatcgattggaataaatcccgtaacacctgcgctaaggaagacttatactatcctcacccaaagatgcaagacattttgtggggttctatctaccatgtctacgaacctttgttcactagatggccaggtaaaagattgcgtgagaaggccttacaagcagctatgaaacatattcactatgaagatgaaaactcaagatacatctgtttgggtccagttaataaggttttaaacatgttatgttgttgggtcgaagacccatactccgatgccttcaagttgcacttgcagagagtccacgattacttgtgggttgctgaagacggtatgagaatgcaaggttacaatggttcccaattatgggataccgccttttctattcaagctatagtcgcaactaagttagttgattcttacgcacctactttgcgtaaggctcatgacttcgtcaaagactcacaaatccaagaagattgtcctggtgacccaaatgtttggtttagacacattcataagggtgcctggccattttccacaagagaccacggttggttgatttcagattgtacagctgaaggcttaaaggcttctttgatgttgtctaagttaccttccactatggttggtgagccattggaaaagaacagattgtgtgatgctgtcaacgttttattgtctttgcagaacgacaacggtggtttcgcttcttatgaattaaccagatcctacccatggttggaattgataaatccagctgaaactttcggtgacattgttatcgattacccatatgttgaatgcactgccgccaccatggaagctttgactttattcaaaaagttgcaccctggtcacagaacaaaggaaatcgataccgcaatcggtaaagctgctaacttcttagagaaaatgcaaagagccgatggttcttggtacggttgttggggtgtttgttttacttacgctggttggttcggtattaagggtttggttgcagctggtcgtacctataattcttgcttggctattagaaaggcctgtgaatttttgttgtccaaggaattgccaggtggtggttggggtgaatcttacttgtcctgtcaaaacaaagtctacaccaacttggagggtaacaagccacatttagtcaacaccgcttgggttttaatggctttgatcgaagctggtcaaggtgaaagagatccagctcctttgcatagagcagcccgtttgttaatgaactcccaattggaaaatggtgattttgttcaacaggaaataatgggcgttttcaataaaaactgtatgattacatatgctgcctatagaaatatcttcccaatttgggctttgggtgaatattgccacagagtcttaactgaataa

SEQ ID NO: 9 - DNA, 2322 bp, Artificial Sequence
  Synthetic
atgtggaggctcaaagttgggaaggaaagtgtaggagagaaggaagaaaaatggataaaatccatctctaaccacttgggccgacaagtgtgggaattttgtagcggtgagaatgaaaatgacgatgatgaggcaattgcggttgccaacaattcagcttctaagttcgaaaatgctcgtaaccattttcgcaataatagattccatagaaaacagtcgtccgacctatttttagcaattcaatgcgaaaaggaaatcattagaaacggtgccaaaaacgagggtacaaccaaggtcaaagaaggagaagatgtaaaaaaggaagcagtgaagaatacgctggaaagggctctttcgttttattcagcggttcaaacttcagatggcaattgggccagtgacctaggtggacctatgttcttattgccaggtttagttatagccttgtacgtcactggcgtacttaactcagttttgtctaaacaccatagacaggagatgtgtaggtatatttacaaccatcaaaatgaggatgggggttggggtttgcacatcgaaggttctagtacaatgtttggctctgctctcaattatgtcgctttaagacttttgggtgaggcagcagatggtggggaacatggggctatgactaaagcacgaagctggattttagaaagaggaggtgctaccgcgataacttcgtggggaaaactgtggctttccgtgttaggcgtttatgaatggtctggaaataatcccctaccaccggaattttggcttttaccttactccttgccattccatccgggtcggatgtggtgccactgtcgtatggtctacttgcctatgagctatctgtatgggaagcgcttcgttggaccaataacacctatcgtgctctcactcagaaaggaattatacacgattccctatcatgagattgattggaaccggagtcgaaatacctgcgccaaagaagatttatattatccacatccaaaaatgcaggacattttatgggggagtatctaccatgtatacgaacctctgttttctggttggcccggcaaacgtctaagggagaaggccatgaaaatcgctatggaacacatacactatgaagatgagaatagcagatacatttgtttgggacccgttaataaggtactgaacatgctatgttgctgggttgaagacccttattcagatgctttcaagtttcacctacaaagaatcccagactacctctggttggcagaagatggtatgaggatgcaaggatacaatggttcacaattgtgggatacagctttttcaatacaagctattatctcaacaaaattaattgacacatttggcccaactcttcgtaaagcgcatcatttcgtaaaacactctcagatacaagaagactgtcccggcgatccgaacgtttggtttagacatatccataaaggagcctggccattttccactagagatcatggttggctgatttcggactgcaccgcagaaggcctaaaagccagtcttatgctctctaagttgccttctaagatagtcggtgagcctttggaaaagaatagattatgtgacgccgtcaatgtgctgttgtctttacagaacgagaatggtggcttcgcaagctatgaattgactagaagctatccatggctggagctgattaaccctgctgaaacattcggcgatattgtcattgattatagttacgtagaatgtacctctgcgactatggaggcattagctttattcaaaaagttacatccaggacaccggacgaaagaaattgacgcagccatcgcgaaagccgctaatttcctagaaaacatgcaaaaaacagatggttcatggtatggttgttggggtgtgtgttttacctatgctggctggtttggtataaaaggtttagttgccgcaggtcgcacctataataattgcgttgctatacgtaaggcttgcaactttctattatccaaggaattgccgggtggcggatggggagaatcttatttgagttgtcaaaacaaagtttacactaacttagagggtaacaaaccgcaccttgtaaatacggcttgggtcatgatggcattaatcgaggcagggcagggtgaaagggacccagcccctttacatagagctgcaagattgttaattaacagtcaattagaaagtggtgatttcccacagcaggagattatgggcgtgtttaataaaaactgtatgatcacatacgccgcttacagaaacatatttcctatatgggcattaggggagtattcacatcgtgttcttgatatg

SEQ ID NO: 10 - DNA, 2172 bp, Artificial Sequence
  Synthetic
atgtggcgtttaaagttgggtaaaggagagaacgaagattacttgttttctaccaatgacttcatcggtagacaaacttgggaatttgatcctaacgctggtacaccacaggaaagagcccaagttgaagctgcaagattaaatttctatcaaaacagaaaccacgtccaatgttcatccgacttgttgtggagattccaatttttggaagagaagaacttcaaacaagctataccaaaggtcgttgttgaagaacgtaatggtaacgatagagaattatctattaagaaggagaccgttaagactgccttgagacgtgctactaacttctttgctgcattacaatccaatcatggtcactggccagctgaaaatgccggtccattgtactatttgcctccattggtcttcgctttgtacattactagagacttgaacaccatcttgtctaaagaacatcaaaaagaaattttaagatacgtttattgccaccaaaatgaggatggtggttggggtttgcacatcgcttctcgtcagtcatgtatgttatgtactgtcttgaactacattgaattaagattattgggtgaagaagctgataacgaagcatgctccagagccagaaagtggatattggaccatggtggtgctttgtacatcccatcttggggtaagatttggttgtctatcttgggtttatatgaatgggaaggtaccaaccctatgccaccagagatttggatgttcggtaagatattgccatggaacttgggtggtttgttatgttacacaagattaaccttattgccaatgtcctacttgtatggtaagagatttgttggtcctttgaccccattaatcttacagttgcgtcatgaaatttacactcaaccatataatgacatcaaatggtcaccagctagacacttgtgtgccaaggaagatgaatacttcgaaagatctattttccagaagttagtttgggacgtcgttacatacgtcggtgaaccaatcttgaagtcctgggcttttaagaaaattagaaatcgtgctatacaaatcgccaagtggtacatggactatgaggatcaaaactcacattacatcactattggttgtgttgaaaagcctttgtttactttgacatcttgggttgtcgatcctcacggtgaagcatataaaaagcatttagctagaataaaggactacttgtgggtcggtgaggacggtatgaagatgcaatcattcggttcccaatcttgggatgttgcatttgctattcaagctattttggctaccaacttacaccacgaattttctgaaactttaaaaaaaggtcacgacttcatcaaacaatctcaagttaagaagaatccatccggtgatttcccaagaatgtacagacatatctccaaaggttcttggaccttttcagatcaggatcacggttggggtgtctccgactgtgctgctgaaaacttgttgtgctgtttgaagttgtctactatgccttcccatattgttggtgattctatggaaccacaatgtttctttgaagccgttaatttcatattgtcattacaagccaaagacggtggtttgtctgcctgggaaccagctggaacattgcctttgtggtttgaagttttgaatcctgttgaatttttcgagtacactgttttggaaattgagtgtgtcgaatgtacttcctctgccattcaagctttggtcttgtttaagaagttgttcccatcccacagaaaaaaagaaattgataacttcatcgaaaaggccaccaattatattaaggaaatccaaaaggaggacggttcttggtatggtaactggggtatttgtcacatctacggtacttacttcgctataaaaggtttagctgctgctggaaatacttacgaaaattgctccaccgtcactaaggctgtcgatttcttgttgaagatccagtgtccagacggtggttggggtgaatctcatatctcttgcttgaacaaagtccatactccattaccaggtaacgcatctaacttggttcaaacctcattcgctttgatgtctttaatccactcccaacaagtctgtttttttttattcttcttcttcccatcatttttaccaatttgcactttgccttccttgataattatcttctaa

SEQ ID NO: 11 - DNA, 2298 bp, Artificial Sequence
  Synthetic
atgtggcgtttaaaggtcggtgctgacacagttccagccgatccttctaaatcaggcggttggttgtccactttgtctaatcatttgggtagacaggtttgggaattttgtgcagagttgggttccccagaagatttacaacaaatacaacacgctagacaacacttctctgaccatagattcgaaaagaagcactctgctgacttattgatgagaatgcaatttgccaaagaaaactcatcattcgtcaacttgccacaaatcaaggttaaggataaggaagatgtcatggaggaagctgttaccagaactttgaaacgtgctattaatttttactccaccatccaggccgatgacggtaactgggcatctgacttgggtggtcctatgttcttgttaccaggtttggtcattgctttgtatgttactggtgttttgaactctgttttgtccaccgaacatcaaagagaaatttgcagatacttatacaatcaccaaaacagagatggtggttggggtttacacatcgaaggtccatccaccatgttcggttctgttttaaattatgtcactttgagattattgggtgaggaagctgaagacggtgaaggtggtgttgacaaggccagaaaatggatcttagatcatggtggtgctacagctataacttcatggggtaagatgtggttgtccgtcttgggtgtctatgaatggaccggtaacaatccattaccacctgaattgtggttgttgccatacttgttaccagttcacccaggtagaatgtggtgtcattgtcgtatggtttacttaccaatgtgttacttgtatggtaagcgttttgtcggccctattaccccaattattagatctttgagaaaggaattgtacttggttccataccacgaggtcgattggaacgaagctagaaacttatgcgccaaagaggatttatattaccctcatcctttggtccaagacatcttgtgggcttctttacaccacgtttacgaaccattgttcatgagatggccagctaagcgtttgagagaaaaggcattaagaactgttatgcaacatattcactatgaagacgaaaattcccgttacatctgtttgggtccagtcaacaaagttttaaacatgttgtgttgttgggttgaggatcctcattctgaagccttcaagttgcacatcccaagagtctatgattacttgtggattgcagaggacggtatgagaatgcaaggttacaacggttctcagttatgggatactgctttctccgttcaagctataatttccacaaagttggctgaagaatacggtaccactttaagaaaggcccacgaatacatcaaagactctcaagtcttggaagactgtccaggtgaccctaacgtttggtttagacacatacacaagggtgcttggccattttcaactcgtgatcatggttggttgatttctgattgcaccgctgaaggtttgaaggcatcattgatgttgtctaaattgccatctaaaattgtcggtgaaccattagaaaaagaaagaatctatgattcagttaatgtcttattgtctttacagaatgagaacggtggtttcgcttcctatgagttgacaagatcctacccatggttggaattaattaacccagctgaaacttttggtgacatcgttatagactacccttacgttgaatgtacttccgccgctatccaagctttggccgcttttaagaagttatacccaggtcaccgttctaacgaaattggtaactgtatcgccaaggctgccgatttcattgaatccatccaagctaccgatggttcttggtatggctcttggggtgtttgtttcacatacgcaggttggttcggtattaagggtttggttgccgctggtagaacctacaacaattgcttgtcattgagaaaagcttgtgattttttgttatctaaagaattagccggtggtggttggggtgaatcctatttgtcctgccaagataaggtctacactaacattaaagatgacagacctcatattgtcaataccggttgggctatgttgtctttaatagaggttggtcaagctgaaagagacccaacaccattgcacagagccgcacgtatattgattaactcacaaatggacgacggtgattttcctcaagaagagatcatgggtgttttcaacaagaattgtatgatcacttacgcagcttacagaaacattttcccaatttgggctttaggtgaatacagatgtagagtcttgcaagctccataa

SEQ ID NO: 12 - DNA, 2358 bp, Artificial Sequence
  Synthetic
atgtggcgacttaaggtcggcaaagagtccgtgggagaaaaggaagaaaagtggataaaatcaatcagtaaccacctgggtcgtcaggtttgggaattttgtgccgagaatgacgatgacgatgacgatgaagcagttattcatgtcgtagctaacagctctaagcacctattacaacaacaaagaagacaatcttctttcgaaaacgctaggaagcaattcagaaataatagatttcatagaaaacaaagttccgatctcttcttgaccatccagtacgaaaaggaaattgctcgcaacggtgcgaagaacggtggtaatactaaggttaaagaaggtgaagacgtcaaaaaggaagctgttaacaatacgttggagagagccttgagcttctattcggctattcaaactggtgatggtaactgggcaagtgatttgggcggtccaatgttcttgttacctgggttggttatcgctttatacgtcacaggtgtgttgaactccgttctatctaagcaccatagacaagaaatgtgcagatatatctacaaccaccaaaatgaagacggtggatggggtttgcatattgaaggttcatctaccatgtttggtagtgcccttaactacgtagctttgcgtttattgggtgaagacgctaacggaggtgagtgtggtgcaatgactaaggctagatcctggatactggaaaggggtggggccacagctattacttcttggggtaagctctggttgtccgttctaggtgtctacgaatggtctggcaataatcccttaccaccggaattttggttgttaccatattctttgccattccacccaggtagaatgtggtgtcactgccggatggtctacttgcctatgagttatctatacgggaaaagatttgttggtccaattaccccaatggtgttgagcctaagaaaggagctttacaccattccctatcatgaagttgactggaacagatctcgtaacacttgtgcccaagaggatttgtactacccacacccaaagatgcaggacatcttatggggttccatttatcatgtttacgaaccgctattcaacggttggcctggtagaagattgagggaaaaagctatgaagatagcgatggaacacatccactatgaagatgagaactctcgttacatctgtttgggtccagtcaacaaagtcttgaacatgctgtgttgttgggtcgaagatccatactctgacgctttcaagtttcacctgcaacgaatccccgattatttgtggttagctgaagatggcatgagaatgcaaggttacaatggttcacaattgtgggacacggccttttccattcaagctatattatccactaaattgattgacaccttcggttccaccttgagaaaggctcatcattttgtgaagcattctcaaattcaagaagattgtccaggcgatccaaacgtttggttcagacacatccataagggtgcttggccgttctcaactagagaccacggttggctaatttcagactgtacagccgaaggacttaaggcgtctttaatgttgtctaaattgccttctaaaatcgttggtgaaccattggaaaagaatagattgtgcgacgctgttaatgtattgctttccttgcagaacgagaatggtgggttcgcttcttacgaattgactagatcctatccatggttagaactcattaaccccgcagaaaccttcggtgacatcgttattgattacagctatgtcgaatgtacgtcagccactatggaagctttggccctctttaagaaactccatccaggtcacagaacaaaggaaatcgacgctgctcttgccaaggcggctaacttcttagagaatatgcaaaggacggatggttcttggtacggttgctggggtgtgtgttttacctacgcaggttggttcggcatcaaggggctagtggctgctggtaggacttacaacaactgtgttgccatcagaaaggcttgtcatttcttgctaagtaaagagttgccaggtggtggttggggagaatcctacctcagttgccaaaataaggtttatactaacttagaaggaaacagaccacacctagtcaataccgcctgggtattgatggcattgatcgaagctggtcagggtgagagagatcctgctccactgcatcgcgccgctagattgttgattaactcgcaattagaaaacggtgattttccacaacaagaaattatgggtgttttcaacaaaaactgtatgattacttacgctgcttatcgaaatatatttccgatttgggccttaggtgaatactcgcaccgtgttttgactgaataa

SEQ ID NO: 13 - DNA, 2295 bp, Artificial Sequence
  Synthetic
atgtggcgtttaaaagtcggagccgagtcagttggcgaaaaggatgaaaagtgggtaaagtccgtgtctaatcacttgggtcggcaggtttgggaattttgtgctgacgcagacgctgtcaccccacatcaaagtctacaaatccacaacgctaggaaccatttccaccaaaatagattccgtagaaaacaatcctctgatctgtttttggcgattcaatacgaaaaggaaatagccaagggtgttaaagttggtgctgtcaaggttaaggagggtgaagaagttggtaaggaagctgtaaaatctactcttgaaagagcattatcgttctatagcgctgtccaaacgtcggatggtaactgggcctctgacttgggtggtcctatgttcctcttgccagggttggtcattgctttgtacgtcactggtgttttaaactccgttctatctaagcatcacagattggaaatgtgcagatatctttacaaccaccagaatgaagacggaggttgggggttgcatatcgagggtacatccaccatgtttggatcagctttaaattacgtggcattgagattgcttggtgaagatgctgacggtggtgatggtggtgccatgactaaggctagagcctggattttggaacgaggcggtgctaccgctattacttcttggggcaaattatggctgagtgttttgggtgtgtatgaatggtctggtaacaatcccctaccaccggaattttggttgctcccatactctctaccattccatcctggtagaatgtggtgtcactgtagaatggtttacttaccaatgtcctacttgtatggaaaaagattcgtcgggccaatcacccctaaggtcttgtccctaagacaagagttgtacaccgtaccataccatgaaatcgattggaacaaatctaggaacacatgtgcaaaggaggatttgtactatccacacccaaagatgcaagacatattatggggttcaatttatcatgtgtacgaacccttgtttactagatggcctggtaaaagattacgtgaaaaggctttgcaaactgcgatgaagcacatccactatgaagatgaaaacagcagatacatatgtttgggtccagttaataaggttctgaatatgttatgctgttgggttgaagacccatacagtgatgctttcaagttacacttgcaacgcgtccacgactatttgtgggtcgctgaagatggtatgagaatgcaaggttataacggttcgcaattgtgggacacagccttcagtattcaggcaatcgtcgctactaaacttgtcgattcatacggccccactctacgcaaggctcatgactttgttaaagattcacaaatccaagaagactgtccaggtgacccgaacgtttggtttcgacatattcacaagggtgcttggccattctctacaagagatcatggttggttaatttccgactgtactgccgaaggtttgaaagcgtctttgatgttgagtaagttaccatcaaccatggttggagaacctttggaaaagtctcgactatgcgatgcggtaaacgttctgttgtcccttcaaaatgataacggtggttttgcttcttacgaattgaccagatcgtacccatggcttgagctaattaatccagctgagacattcggtgatatcgtaatcgactacccatatgttgaatgtaccgcagccactatggaggctcttacgttattcaagaaattacatccgggccacagaactaaggaaattgacaccgctatcgctaaagccgctaattttttggaaaagatgcaaagaactgatggttcttggtatggttgttggggtgtttgtttcacttacgctggttggttcggaatcaagggtctcgtcgctgctggtcgtacatataactcctgcgtagccattagaaaagcttgcgaatttttgttatctaaggaacttccaggtggtggctggggcgagtcttacttgtcctgtcaaaacaaggtctacaccaatctcgaagggaacaagcctcacttggtcaacactgcatgggttttaatggccttgattgaagctggtcagggggagagagatccggctcccttacacagagccgccagattgttgatgaactcgcaattagaaaatggagacttcctccaacaagaaatcatgggggttttcaataaaaactgtatgataacgtacgccgcttacagaaacatattcccaatttgggcgttgggtgaatactgtcaccgcgtcttgacggaataa

SEQ ID NO: 14 - DNA, 2298 bp, Artificial Sequence
  Synthetic
atgtggcaattaaaggttggtgccgatacagtcccttccgacccatctaacgctgggcgttggttgtctaccttgaataaccatgttggtagacaggtctggcactttcacccagagttaggttcaccagaagatttgcaacaaatccaaaatgcaagacaacatttctacgaccacagattcgaaaaaaagcattcctctgacatattgatgagaatgcaatttgctaaagaaaactcttcattcgttaacttacctcaaattaaggttaaggaaaaggaagatgtcgttgaagaggctgttactcagactttgcgtagagccatgaatttctattccaccatccaggctgatgatggtcactggccaggtgactacggtggtccaatgtttttgttgccaggtttggtcattactttatctattactggtgctttgaacgccgttttatcaaccgaacatcaaagagaaatctgccgttatttgtacaatcaccaaaacagagatggtggttggggtttgcacattgaaggtccatccacaatgttcggttctgtcttgtcctacgttaccttgagattattgggtgaagaagctgaggacggtcaaggtggggtcgaaaacgcaagaaaatggatattggatcatggtggtgctacagctattacttcttggggtaagatgtggttatcagtcttgggtgtttatgagtgggctggtaataaccctttgccacctgaattgtggttattaccatacttattgccatttcacccaggtagaatgtggtgtcattgtagaatggtctacttaccaatgtgttatttgtacggtaagagattcgttggtcctatcactccaatcatcagatctttgagaaaagaattgtacttggtcccataccacgaaattgactggaacgaagccagaaatcaatgcgctaaggaggacttgtactatcctcatccattggttcaagacgttttgtgggcttccttgcaccacgtttacgaaccattattcatgagatggccagctaaacgtttacgtgaaaaggccttaagaaccgtcatgcaacacattcattacgaagatgaaaacaccagatatatctgtattggtcctgttaataaggttttgaacatgttgtgttgttgggttgaagacccacactctgaggcttttaagttacatataccacgtatttatgattacttatggttggcagaagatggtatgaagatgcaagggtacaatggttctcaattgtgggacactgccttcgcagtccaggctattatgtccacaaagttggttgaagaatatggtactactttgagaaaggcccacaaatacattaaagattcacaagtcttggaagattgtccaggtgacttgcaatcttggtacagacatatatccaagggtgcttggccattttctaccgctgatcatggttggcctatctccgattgtactgccgaaggtttgaaggctgttgtcttgttgtctaagttaccttccgagattgtcggtaaaccagttgacgaagagagaatgtacgacgccgttaacgttatcttatctttacagaacacagacggtggttttgctacctatgaattaaccagatcctatagatggttggaattgatgaacccagctgaaaccttcggtgatatagttatcgattacccatatgtcgaatgcacttccgcagcaattcaagctttagctgctttccgtaagttgtatccaggtcacagatctaatgagatcggtaactgcattgctaaagccgcagatttcatagaatctattcaagctactgacggttcttggtacggttcttggggtgtttgttttacctatggtggttggtttggtatcaaaggtttggttgccgctggtcgtagatacgaaaattcttcttcattgagaaaggcttgtgattacttattgtccaaggaattgccagccggtggttggggtgagtcatacttgtcatgtcaagacaaagtctacaccaatattaaggatgatagaccacacttagttaacaccgcttgggctatgttatcattgatcgacgcaggtcaagctgaaagagacccaactccattgcatagagccgccagaattttaatcaactcccagatggaagatggggatttccctcaagaagacatcatgggtgtctttaataaaaattgcatgatatcttattctgcttacagaaacatcttccctatttgggcattgggtgcttatcgttgtcgtgttttgttggcttcttaa

SEQ ID NO: 15 - DNA, 2298 bp, Artificial Sequence
  Synthetic
atgggtgaaatgtggaaattgaagttttctaagggttgggagacctcagaaaacgatcacgttgggcgtcaatattgggaatttgacactaatttaactccttccgaagaagaaaaggcacagatacaaaaattctacaacgaattttacaactatagattccaagccaagcattcttccgatttgttaatgagattccaattgagaaaggagaataacggtggtgaagtcaaattgccaacacaaatcaagattaccggtgaagaagagattaacgaagaagctatcgaaaagaccttaagacgtggtattagattctactctacattgcaaactcaagacggtttttggccaggtgactacggtggtccattgttcttgttgccagctttagttattggtttgtctgtcactaaggctttggatactgctatatcagttcaccatagacacgaaatgtgtagatacttatataatcatcagaacgaagacggtggttggggtttgcacatcgaaggtaattccactatgttgtgcaccgcattgtcttatgtctctttaagattattgggtgagaagatggatggtcgtgatggtgttttgttaaaagccagaagatggattttagacagaggtggtgctacatccatcccttcctgggggaagacttggttgtctgtcttgggtgtttacgaatgggaaggtaacaatccattgccaccagagatctggttgttaccatactcattacctttgcacccaggtagaatgtggtgtcactcaagaatggtttatttgccaatgtcttacttgtatggtaaacgtttcgtcggtcctatttctccaataatcatttctttgagaagagaattgtacacctgttcctaccatacaatcgactggaacttatctcgtaacttatgtgctaaagaagatttgtacaccccacattctaagattcaaaatatattgtggaactccatccacaagtttggtgagccattgttaaagaaatggccattgtccaaggttagacaaaaagccttggatttcgtcattcaacatatccattacgaagacgaaaacacccactacttgtgtttaggtcctatttctaaggttttaaatatggtttgctgttgggctgaagatcctaactcagaagcattcagaagacatatcccacgtattaaagattatttgtggttggctgaagacggtatgaagatgcagggttataacggttctcagttgtgggacgtcgtctttgctgttcaagccatcttagctactgatttagttgacgagtacggttctgttttgaagaaggcccacaacttcataaagaactctcaaatgaagagaaatgggattaaagaccaaaacaacccatccgtttggtatagacacatgtctaaaggtggttggccattctcaactcctgataacgcttggccagtctccgactgcacagctgaagctttgaaggcagctatcttgttgtcacaaatgcctactaccatggttggtgaaccaattgatgtccacaatttgtacgatgctgtcaacttgattttgtcattgcaaaactccaatggtggttttgcatcctacgaattgaccagatcctatccatggttggaaatgttaaacccagccgaaatatttggtgatgttatgatagactaccaatacgttgaatgtacttctgctgccattcaaggtttgaaagctttcatgaagttacacccaggttatcgtaagaaagacattcaaacttgtatctctaaggctgctcacttcattgaaactatccagttgccagatggttcctggtacggttcctggggtatctgctacacttacggtacctggtttggtattaagggtttggttgcctgtggtagaacctacgctaactctaaatgtatccgtaaggccacacaatttttgttgtctaaacaattgaagtcaggtggttggggtgaatcatacttgtctgctcatcacaaggtctatgcagatttaaaagacggtaagtctcacattgtcaatacctcttgggcattattagctttgattcaagccgaccaagctcaaagagatccatctcctttgcatagagctgccactgttttaattaattcacaaatggatgatggtgacttcccacaacaagaaatcatgggtgtttttaataagtcttgtatgatttcctatgctgcatacagaaatatcttcccaatctgggctttaggtgaatacagaatcagagttttacaattgcctgagaactaa

SEQ ID NO: 16 - DNA, 2301 bp, Artificial Sequence
  Synthetic
atgtggagattaaagattggtgccgacactgtaccatccgatcccagcaacgctgggggttggctgtcgaccctatcaaatcatcttggaaggcaggtgtgggagttttgcgctgaattgggttctccggaagatttgcaacaaatccaacaagcacgtcaaagattctctgaccacagattcgaaaaaaagcactccgctgacctcttgatgcggatgcaatttgccaaggaaaactctagtttcgtcaacttgcctcaggttaaagttaaggataaggaagaagtctctgaagaagctgtcacaagaactttgcgaagagcaattaatttctattccacgatacaagctgatgacggcaactgggcctcggatttaggtggtccaatgtttttgttaccaggtttggttatcgctctctacgttaccggcgttttaaattccgtgcttagtactgagcatcaaagagagatttgtagatacttgtacaaccaccaaaaccgtgatggtggttggggattgcacatcgaaggtccatctaccatgttcggttctgtgttgaactatgtcactcttagactactgggtgaagaagccgaagacggtcaaggtgctgttgacaaggctagaaaatggatattggatcatggtggggccgcggcgattacatcatggggtaagatgtggctatccgttctgggtgtctatgagtgggctggcaataatccattgcctccagaattgtggttattaccttacctcttgccatgtcacccaggtagaatgtggtgtcactgtagaatggtttacttgccaatgtgctacttgtatgggaaacgttttgtcggtccaatcaccccaattatccggtctttgagaaaggaactctacttggttccctaccatgaagttgattggaataaggcaagaaaccagtgtgctaaggaagatttatattacccacatcctctagtacaagacatcttgtgggcttctttacatcacgtctatgaacctttgttcatgcactggccagctaaaagacttagagaaaaggctttacaatcggttatgcaacacattcattacgaagatgaaaacagcaggtatatatgtctgggtccagtaaacaaagttttaaatatgttgtgctgttgggccgaagacccacattccgaagctttcaagttgcacattccgagaatttacgactacctatggatcgctgaggacggtatgagaatgcagggttacaacggttctcaattatgggacactgcgtttagcgtccaagctattatcagtacagaattggccgaagagtatgaaactacccttagaaaggcccataagtacataaaagattcacaagtcctagaggattgtccaggagatccaaacgtttggttcaggcacattcacaagggtgcatggcctttctctacaagagaccacggttggttaatttccgactgtaccgctgaaggtttgaaggcttctctcatgttatccaaattgccttcgaagatcgtaggagaaccactagaaaagcaacaactgtacaatgctgttaacgtgttgttatccttgcagaacgagaacggtggcttcgcatcttacgaactaactcgttcttacccatggttagaactaattaatcccgctgaaacgtttggtgacatcgtgattgattatccgtacgtcgaatgctcctctgctgcaatccaagctttggccgcctttaaaaaattgtacccagggcatagaagagacgaaatcaacaattgtattgccaaggctgctgatttcatcgaatctattcaggctactgatggtagttggtatggttcctggggtgtctgtttcacgtacgccggatggtttggtattaagggtctagtcgcggccggtcgcacttacaacaactgctcttcattacggaaggcttgtgatttcttgctaagtaaggagttggctgctggtggttggggtgaaagctatctctcttgtcaaaataaggtttacaccaacattaaggatgaccgcccacacatagttaatactggttgggctatgttgtcacttatagacgcagggcaatccgagagagatccaacccctttgcacagagctgcaagagttttgataaattcccaaatggaagatggtgattttccacaagaagaaatcatgggtgtttttaacaaaaactgtatgatcacatatgctgcctacagaaacattttcccaatatgggctttgggggaatacagatccagagttttaaaattattaaagtaa

SEQ ID NO: 17 - DNA, 2289 bp, Artificial Sequence
  Synthetic
atgtggcgtttgaagatcgctgacggtggcaacgatccttatatttactccacaaatgattttataggtagacagacttgggaatttgacccagaggccggtaccccagaagaaagacaagaagttgaagaagcaagacaccatttctacagaaaccgttataaagtcaagccatctgctgattgtttatggagaatgcaattcttgagagaaaagaaattcaagcaagagatcggtgctgtcaaaattaaggaaggtgaagaaatttctcaagacaaggccagaatcgctttacgtagagccgttcacttctactcagctttgcaagcttctgatggtcattggccagcagaaaatgctggtccattgttttttttacctccattggttatgtgcttgtacataactggtcacttagaccaagttttccctgaagaacataagaaagaaattttgagatacatctattgtcaccagaacgaggatggtggttggggtttgcatattgagggtcattccaccatgttctgtactgccttgtcctacatttgtatgagaatcttgggtgaaggtccagacggtggtttaaacaatgcttgtgctagaggtagaaagtggattttagatcacggttctgtcacctacatcccatcttggggtaagacctggttgtccattttgggtgtttacgactgggctggctcaaacccaatgccacctgaattttggttattgccatctttcttgccaatgcacccagccaagatgtggtgctattgtcgtatggtctatatgcctatgtcctacttgtatggtaaaagatttgtttgtcaaatcactcctttaattcaagaattgagattggagttacatgctcaaccattcgatgaaataaactggaagaaaactagacacttatgtacaaaagaagatgtttattacccacacccattgatgcaagatttgttgtgggactcattatacatttgtactgaacctttgttaaccagatggccattcaataagttggtcagagagaaggctttgcaagttacaatgaaacacatccattatgaagacgataactctcgttacatcaccatcggttgcgtcgaaaaggttttgtgcatgttagcatgttgggtcgaagatccagatggtgactacttcaagaaacacttggcacgtattcctgactacatttgggttgccgaggacggtatgaaaatgcagtcctttggttctcaagaatgggacactggtttcgctatccaagctttattggcagctgatatggctgacgaaataggtccagttttggctagaggtcatgattttattaagaagtctcaggtcaaggataatccatctggtaacttcaagaccatgcacagacatatatcaaaaggttcttggactttctccgaccaagatcacggttggcaagtctccgactgtaccgccgaagccttgaagtgctgtttgttgttctcattaatgagaccagaaattgtcggtgacaagatggaagctcaaagattgtatgactctgttaacgttttgttgtctttgcaatctaaaaatggtggtttggcagcttgggagcctgctactggtcaaaagtggttggaaatgttaaacccaacagaattttttgctgacattgttatcgaacacgagtacgtcgagtgtaccgcctcagctatccaagctttgatcttgttcaagaagttacatccaggccatagaactaaggaaattgataactttattcaaaatgctgtcagatacttgcaggatatccaaatgccagatggttcttggtacggtaactggggtgtttgtttcacctatggttgctggtttgccttaggtggtttagttgccgcagctaagacattcaataactgtgccgctataagaaaaggtgttcatttcttgttgaacattcaaatgccagatggtggttggggtgaatcctaccactgttgcccatctaagaagtatgtcccattggaaggtaagcgttcaaatttggttcacactgcctgggctatgatggccttgatccactctggtcaagctgaaagagatcctactccattgcatcgtgctgcaaagttattaattaattcccagacagaagatggtgatttccctcaacaagaaattaccggtgtttttatgaaaaactgtatgttgcactatgctgcatacagaaacatctacccattgtgggctttagctgaatactctaaaagagttaagttggcttcaacttctccataa

SEQ ID NO: 18 - DNA, 2289 bp, Artificial Sequence
  Synthetic
atgtggcgtttaaaagtcgcagacggtggcaacgatccatacatctattccatgaataactttgttggtagacaaatatgggaatttgaccctgatgctggttctccagacgagagagctgaagttgaaagagtcagaaatgaatttacaaagaaccgtttgaagggtttcccatcagccgatttgttatggagattgcagttgttaagagaaaaaaatttcaagcaatctattccacctgttaaggtcgaagacggtgaggaaattacctacgaaatggcctccgatgctatgaagagaggtgcttatttcttggaagcaatccaagcttctgatggtcactggccttccgagacttctggtccattgttctacttgtgtccattattgatttgcatgtacatcatgggtttcatggattcagctttttctccagaacataagaaagaaatgatgagatatttatacaaccaccaaaacgaagacggtggttggggtttgcatgttggtggtcactcaaacatgttctgtactaccttcaactacatttccttgagattgttaggtgaggaaccagatgttgaagccgtcgctaaaggtcgtatctggatcagagaccatggtggtgttacttctattttgtcctggggtaagacctggttgtctatattgaatttgttcgactggtctgcctctaatccaatgccacctgaatattggatgtttccaacatgggtccctattcacccatccaatatgatgtgttacactagaatcacctacatgccaatgtcatatttatatggtaagagatttcaagctccattgactccattagttttacaattgcgtgatgaattgcacactcaagcttacgaaaagattaactggagaaaggttagacacatgtgtgcaaccgaggacttgtacttcccacatccattcgttcaggacttattatgggatactttgtatatgttgtctgaacctttaatgacccgttggccatttaataaattgatcagacaaaaagctttggatgaaacaatgagacatattcattacgaggatgaaaactctcgttacataacaattggctgcgtcgaaaagccattgtgtatgttagcctgttgggtcgaagacccaaactctgaatatgttaaaaagcacttcgcaagaatacctgattacttgtggatggctgaagacggtatgaagatgcaatcctttggttcacaatcctgggatgccgctttggctatgcaggctttgttggcctgcaatatcactcacgatattggttcagctttgaacaacggtcacgaatttattaagaactctcaagttagaaataaccctccaggtgactacaagtccatgttcagatatatgtccaagggttcctggaccttctctgactgtgatcatggttggcaagtttcagactgtactgctgaaaatttaaaatgttgtttgttgttatccttgttgccacctgagatcgtcggtgaaaagatggagccacaaagattctacgatgctgttaacgtcatcttgaacatgcaatctaagaacggtggtttacctgcctgggaaccagcatcttcttactactggatggaatggttgaacccagtcgaatttttagaagatttgatcattgaacaccaacatgttgaatgtacctcttcagctttgcaggctattttattgttcagaaaacaataccctgagcacagaaagaaggaaatcaataacttcattaacaaggcagtccaatttttgcaggacatacaattgccagatggttcctggtatggtaactggggtatctgctacacctacggtacttggttcgctttgaaagctttgtcaatggcaggtaagacatatgagaactgtgaagctttgcgtaaaggtgccaattttttaattaagatccaaaacccagaaggtggtttcggtgaatcctatttatcttgtccatataaaagatacattccattagacggtaaaagatctaacttggttcaaactgcttggggtatgatgggcttaatcgccgctggtcaagctgatgttgatccaggtccaatacacagagcagccaagttattaatcaactcccaaactgaagatggtgacttccctcaagaagagattactggtgaattttttaagaactgcacattgcatttcgctgctttcagagaagtcttccctgtcatggctttgggtgaatactgtaataaggttccattgccatctaaaaaaaataccatcaattaa

SEQ ID NO: 19 - DNA, 2280 bp, Artificial Sequence
  Synthetic
atgtggcgtttaaaggttgcagatggtggcaatgacccttatatctactccatgtctaaccacttgggtagacaggtctgggaattttgtgctgacgctggttcaccagatgagagagccgaagttgaaagagtcagaaacgaatttactaaaaacagattgaagggtttcccatctgctgatttattgtggagattgcaattgttacgtgaaaaaaatttcaagcaatccattccaccagttaaggtcgaagacggtgaggaaataacatacgaaatggcctcagatgctatgaagagaggtgcttatttcttggaagcaattcaagcttctgatggtaactgggcctctgacttgggtggtcctatgttcttgttgccaggtttggttatcgctttatacgttaccggtgtcttgaactccgctttttctccagaacataagaaagaaatgatgagatacttatataatcaccaaaacgaggacggtggttggggtttgcatgttggtggtcactctaacatgttctgcactacctttaattacatttccttaagattgttgggtgaagaaccagatgtcgaagccgttgctaagggtagaatttggatccgtgatcatggtggtgttacttcaatcttgtcttggggcaaaacatggttgtctatattaaacttgttcgactggtccgcctcaaacccaatgccacctgaatattggatgttccctacctgggtcccaattcacccatctaatatgatgtgttacaccagaatcacttacatgccaatgtcctacttatatggcaagcgttttcaagctccattgactcctttagttttgcaattaagagacgaattacacacccaggcctacgagaagattaattggagaaaggttagacatatgtgtgctactgaggatttgtatttccctcacccattcgttcaagacttgttgtgggatacattgtacatgttatctgaaccattgatgactagatggccatttaacaaattgatcagacaaaaggctttggacgaaaccatgagacacattcattacgaagatgaaaactctcgttatatttgtttgggtccagtcgaaaaaccattgtgcatgttggcatgttgggtcgaggatccaaattccgaatacgtcaagaagcatttcgctcgtataccagactacttatggatggccgaagacggtatgagaatgcaaggttacaacggttctcagttgtgggatacagctttctcccaagcattattggcttgtaacataactcacgatatcggttcagctttgaataatggtcacgaatttattaaaaattcacaagttagaaacaaccctccaggtgatccaaacgtttggttcagacatatccacaaaggtgcttggccattctctactagagatcacggttggttgatctctgactgtaccgccgaaggcttaaaggcctccttgatgttgtccaagttgccttctaagattgttggtgagccattagaaaagtacgacgccgttaacgttttgttatcattacaaaatgaaaacggtggttttgcttcctatgaattgactcgttcctacccatggttggagttaatcaacccagctgaaacattcggtgatatcgtcattgactaccaacatgtcgaatgcacctcctctgctttgcaggcaatattattatttagaaagcaatatcctgaacacagaaagaaagagatcaataactttattaataaggccgttcaatttttacaagacattcaattgcctgatggttcttggtacggtaactggggtatttgttacacttatgctggttggttcggtattaagggtttggtcgctgctggtagaacctacaacaactgtgaagcattgagaaaaggtgccaatttcttgattaagatacaaaacccagaaggtggttttggtgaatcttatttgtcttgtccatataagagatacatccctttagacggtaagagatcaaacttggtccaaaccgcttggggtatgatgggtttgattgctgctggtcaagcagatgttgatccaggtcctatacatagagctgctaaattattaatcaattctcaaactgaagacggtgatttcccacaagaagaaatcatgggtgtcttcaacaagaactgcatgattacctacgcagctttcagagaagtttttccagttatggctttgggcgagtattgtaataaagttccattgccatctaagaagaacactattaattaa

SEQ ID NO: 20 - DNA, 2358 bp, Artificial Sequence
  Synthetic
atgtggcgtttaaaagtcggtaaggaatccgttggcgagaaggaagaaaagtggattaaatcaatatctaaccatttgggtagacaagtttgggaattttgtgcagagaatgacgatgatgacgacgatgaagctgtcatccacgttgtcgctaactcttccaagcacttgttacagcaacaaagaagacaatcttctttcgaaaatgccagaaaacaattcagaaacaatcgttttcatagaaagcaatcctctgatttgttcttgaccattcagtacgaaaaggaaatcgccagaaacggtgctaagaacggtggtaacactaaggttaaagaaggtgaagacgttaagaaggaggctgtcaataacacattggaaagagctttatcattctattcagcaattcaaacttctgatggtaattgggcttccgacttgggtggtcctatgtttttattgccaggtttggtcatcgccttatacgttaccggtgttttgaactctgtcttgtccaagcaccacagacaagaaatgtgccgttatatttacaatcatcaaaacgaggacggtggttggggtttacatatcgaaggttcatccaccatgttcggttctgctttgaactatgttgcattgagattattgggtgaagatgctaatggtggtgaatgtggtgccatgactaaggctagatcttggatcttggaaagaggcggtgccacagctattacttcatggggtaaattgtggttgtctgttttgggtgtctacgaatggtctggtaataacccattaccacctgaattttggttgttaccatactccttgccattccacccaggtcgtatgtggtgtcattgcagaatggtttacttgccaatgtcttatttgtacggtaaaagattcgttggtcctataacccacatggtcttgtctttaagaaaagaattgtacactataccataccatgaaattgactggaaccgttccagaaacacttgtgctcaggaggatttgtattacccacacccaaagatgcaagatatcttgtggggttccatttaccacgtctatgagcctttgtttaatggctggccaggtagaagattacgtgaaaaggccatgaagattgctatggaacacatccattacgaagacgagaactcaagatacatttgtttaggtcctgttaacaaggttttaaacatgttgtgttgttgggttgaagatccatactctgatgctttcaagtttcacttacaaagaatcccagattatttgtggttggctgaagatggtatgagaatgcaaggttacaatggttcccaattgtgggacactgctttttctatccaagcaattttatctaccaaattgatcgatacattcggttccaccttgagaaaagcccaccatttcgtcaagcactcacaaatccaagaagactgtccaggtgatccaaatgtttggtttagacatattcataagggtgcttggccattctccaccagagaccacggttggttaatatctgactgtaccgctgaaggtttaaaggcctctttgatgttgtctaagttgccatctaaaatagttggtgaaccattggagaagaacagattgtgcgacgcagttaacgtcttgttgtccttgcaaaatgaaaatggtggtttcgcttcctatgaattaactagatcttatccatggttggaattaattaacccagccgaaacttttggtgatatcgttattgactactcttacgtcgaatgtacatcagctactatggaggctttagctttatttaagaaattgcacccaggtcatagaaccaaagagattgacgctgccttggctaaggctgctaacttcttagaaaacatgcaaagaaccgatggttcttggtacggttgctggggtgtctgtttcacttatgctggttggtttggtattaagggtttggtcgccgctggtcgtacttataataattgtgttgcaattcgtaaagcatgtcacttcttgttgtctaaggaattgcctggtggtggttggggtgaatcctacttatcctgtcaaaacaaggtttatacaaacttggaaggtaatagacctcacttagttaataccgcctgggtcttgatggcattgatcgaagctggtcagggtgagcgtgatcctgccccattacatagagctgccagattgttgattaactcccaattggaaaacggtgattttccacagcaagaaattatgggcgtcttcaacaaaaactgtatgataacatacgccgcttacagaaacatatttccaatctgggctttaggtgaatattcacacagagtcttgactgaataa

SEQ ID NO: 21 - DNA, 2277 bp, Artificial Sequence
  Synthetic
atgtggaggttgaaggtagctgatggcggaaatgacccctacatagactcaacaaacaactttgtgggtcgtcaaatctgggagttcgatcctgattatggtactccggacgaacgcgccgaagtcgaagctgcaagagaaaacttctggaaaaatagatttcaggttaagttatctagtgaccttctatggagaatgcaattcgctagagaaaacccatgcgttaccaatttgccacaaattaaggtccaagatttggaggaagtgacggaagaagtcgtaaccactactctgaggagaggtttgaacttctactccaccattcaagcgcatgacggtcactggcctggtgattgtggtgggccaatgtttctattaccaggtttggttatcactttgtatgttactggtgccttacacgtcgttctttcgatcgagcaacagagagaaatgtgtagatacttgtgtaaccatcaaaacgaagatggtggttggggattgcacattgaaggcccatctaccatgtttggtacagttttgaattacgttaccctcagattattgggagaagctgacttcggtgctaaaggtgccatggaaaagggtcaaaagtggattctggatcatggcggtgctactgctattacgagctggggtaagatgtggttgtctgtcttaggtgcatatgaatggttcgggaccaacccattgcctccagaaatgtggttatgtccatacatccttccagttcacccgggtagaatgtggtgccattgtcgtatggtgtatttgcccatgtcctacttatacggtaaaaagttcgtcggcccaataaccagcactattatctcgcttcgtaaggaattgtacatcgttccatatcacgaagttgactggaatcaagctagaaatcagtgtgccaaagaggacttatattacccacacccattggtccaagatattttgtgggctagtttacataaggttttggagcctattcttggtcactggccaggtaacaatctaagagaaaaggccttatgtactgtgatgcaacacgttcattacgaagacgaaaacactagatacatttgcttgggccctgtcaacaaagtactaaacatgttgtgttgttggatcgaagatccaaactccgaagcttttaagttgcacataccaagaatcttcgattacctgtggatagctgaagatggtatgaaaatgcaaggttactctggttcacaattatgggacacgtcctttgctgttcaagctatcatttctactaatctaggtgaagaatatggtttgaccttgcgcaaggcacacgaatttattaagaactctcaggtcctggaggattgccctggtgacttgaagttctggtacagacacatctctaaaggggcatggccattctccacagccgaccaaggttggcctatctctgactgtacggctgagggcttgaaagccgtattattgctgagtaagcttccagttgaaaccgtcggggaaccattggatatgaagcatttgtcagatgctgttaatgtcattctatccttgcaaaatgcggatggtggtttcgctacttacgagcttactagatcttatcgttgggttgaactcattaaccctgccgaaacattcggcgacatagttatcgattacccatacgtggaatgtacctcggctgctatacaagccctcacttctttcaagaagctatatccggaacatagaagacatgaaattgaaaactgcatttctaaagctgcgaaatttattgaagaaatccaggctccagacggatcttggtatggttgttggggtgtctgttttacctatggtggttggttcggtatcaccggtttgattgctgccggtaatacatactccaattgtccatgtatcagaaaggcgtgtgattacttgttgagcaaggaattagcctcaggtggttggggtgaatcatacttatcctgtcaaaacaaggtctacacaaacctccctggagataagccacatatagttaacactgcttgggctatgctagctttgattgaagcaggacaagctggtcgtgacccgaatccattacacagagcagctcgaatcttgatcaatagtcaaatgaagaacggcgattttccccaagaagaaatcatgggagtgtttaacaaaaactgcatgattaactactctgcctatcgaaatatatttccaatctgggctctaggtgagcacagaagtagggtcttgcattcgtcctaa

SEQ ID NO: 22 - DNA, 2361 bp, Artificial Sequence
  Synthetic
atgggtaatatcaaggaacgtaaaggaaaggatagagagagacaaagagaaatgtggaagttaaaaataggtggtgaatccgtcggtaagaacaacgaagaaaaatggttgaagtcaatttctaatcacttgggtagacaggtttgggaattttgcccaaagttagaaaccgagactgaaacagagactgaatctcaaattgaaaacgcccgtaacaccttccatttgaacagattccacaaaaagcaatcctctgacttgtttatcactttgcaatatggtaatgaaattgctaaaatcgaaggtgttaagattaaggaaaaggaagaagtcagagaggaagctgttaaaactacattggagagagcattaaatttctactccgccatccaaacctcagacggtcattgggcttctgatttgggtggtcctatgttcttgttaccaggtttggttattactttgtacgtcaccggtgttttaaactccgtcttgtctaagcaccatagacaggaaatatgtagatatttgtacaaccaccaaaatgaagatggtggttggggtttacatatcgaaggtccatctactatgtttggttctgttttgaactacgtcgctttacgtttgttggctcaagactccgagtacgattccattttgaaaggtagaagatggatcttggaccacggtggtgcaacaggtattacctcatggggtaagttatggttgtccgttttaggtgtttatgaatggtgtggtaacaatccattgccacctgaattttggatcttgccatacttcttgccattccaccctggaagaatgtggtgtcactgccgtatggtttatttgccaatgtcttacttgtacggtaagagattcgtcggtccaattacccctactgtcttatctttgagaaaggaattatatacagtcccatatcatgaaattgactggaacaaatcccgtaatacttgtgctaaggaggatttatactacccacatcctaaaatacaagacatcttgtgggcttctttacatcacgtttacgaaccattctttaccagatggccaggtaagagattgagagataaggccttgcacgccgctatgcaacacatccattatgaagatgaaaatactagatatatttgtttgggtccagttaacaaagttttgaacatgttgtgttgttgggtcgaagaccctcactcagacgcttttaagtttcatttgcaacgtgtttacgattacttatgggttgctgaagatggtatgaagatgcaaggttacaatggttcacaattgtgggatactgctttctctgtccaagcaatcatctctaccaagttgactgaaaacttcggtccaacattaagaaaggcccataatttcattaagttgtcccagattcaacaagactgtccaggtgatccaaacatttggtatagacacatccataagggtgcttggcctttctctactgctgatcacggttggttaatttctgattgcaccgccgagggtttaaaggcatctttattattgtccaaagtctcttccaacacagttggtgaaccattggaacgtaacagattatttgacgctgtcaacgttttgttgtctttgcaaaacaagaatggtggtatagcctcatacgagttgactagatcttatccatggttagaattgatcaatcctgctgaaacctttggtgacattgttatcgactacccatatgttgaatgcacttctgctaccattgaagcattggctttgttcaaaaagttgtacccaggtcacagaaccaaggaaattgacaacgtcatagctaaggccgctaaattcttagaagatatgcaaagagaagatggttcttggtacggttgttggggagtttgttttacatacgcaggttggttcggtatcaagggtttggttgctgctggtagacaatataataattccccaaccattcgtaaggcatgtaacttcatattgtccaaagagttgccaggtggtgttggtggttggggtgagtcatacttgtcatgccagaacaaagtctacaccaatttggatggtaacagaccacatttggttaacacatcctgggctttgatggctttgatcgaagctggtcaggccgaccgtgacccaacccctttacatagagctgccagattgttgatcaactcccaattggaaaacggtgactttccacaacaagaaattatgggtgtcttcaacaagaattgtatgatcacttacgccgcttacagaaacatttttccaatctgggccttaggtgaatactgtcacagagtcttgaaccagcacagatcttctccattgttttaa

SEQ ID NO: 23 - DNA, 2310 bp, Artificial Sequence
  Synthetic
atgtggaagctaaaaattggtggcgaatctgttggtaagaacaatgaggaaaaatggcttaagtcgataagcaaccatctgggtcgacaggtgtgggaattttgtcctaagttagaaacagaaaccgaaactgagacggaatcccaaatcgaaaatgcccgtaacaccttccacctcaacagattccacaagaaacaatcatccgacttgttcatcacattgcaatacggaaatgagattgctaagattgaaggtgtcaaaatcaaggaaaaggaagaagtaagggaagaagcagttaagactactttggaaagagctttaaacttttatagtgctatacaaacttctgatggtcattgggcctctgatttagggggtcccatgttcttgttgccaggtttggtcattaccctgtacgttaccggtgttttaaatagtgtcttgtctaaacaccacagacaagaaatctgccgctacttgtataaccatcaaaatgaggacggcggttggggtttgcacattgaaggtccatccactatgtttgggtctgttctcaactacgtggctcttagattgttagctcaggactccgaatatgattcgattctaaagggtcggagatggatccttgatcacggtggtgcaacaggcatcacttcttggggaaagttatggttgtcagttttgggtgtctacgaatggtgtgggaacaacccactacctccagaattttggatcttaccatatttcttgcccttccatccaggtcggatgtggtgtcattgccgtatggtttacctgccaatgtcctacttgtacggtaaaagattcgtaggtccaattactcctaccgtcctatctttgagaaaggaactctatacggtgccataccacgagattgactggaataagtcaagaaacacctgtgccaaagaggacctgtactatccacacccgaagattcaagatattttgtgggcttccctgcatcatgtttacgaaccattttttaccagatggcctggtaaaagattgcgtgacaaggctcttcacgccgctatgcaacatatccactacgaagatgagaatactagatatatatgtttgggtccagtcaacaaagttctaaacatgttgtgttgttgggttgaagatccccattcggatgcgttcaagttccacttacaaagagtctacgactatctgtgggtcgctgaagacggtatgaagatgcaaggttataatggaagccaattgtgggacaccgcatttagtgtacaggctataatttctaccaagctcactgaaaattttggcccgactttaagaaaggcgcacaacttcatcaagttgtcacaaattcaacaagattgtccaggtgatccaaatatttggtacagacatatccacaagggtgcctggccgttctctaccgctgatcacggttggcttatctccgattgcacggctgaaggtttgaaagcttctctattgttgtctaaagtttcgtctaacacagttggggaacctttagagagaaaccgcttatttgacgctgtcaatgttttgttgtccttgcaaaacaagaacggtggaatagcttcctacgaattgactagaagctacccatggcttgaattgatcaatccagccgaaacattcggtgacattgtcattgattacccatacgttgaatgtacctcagctactatagaagctttggcccttttcaagaagttgtatcctggtcaccgaactaaggagattgacaatgtcatcgcgaaggccgctaaattcttggaagatatgcaaagagaagacggttcatggtacggatgctggggtgtgtgttttacgtatgcaggttggtttggtattaagggtttagttgctgccggtagacagtataacaactctccaactataagaaaggcttgtaatttcatcttaagtaaagagttgccaggtggtgtcggcggttggggtgaatcttatctgtcttgtcaaaacaaggtatacaccaacctagacggtaaccgtccacatttagtcaacaccagttgggctttgatggccctaattgaagctgggcaggctgaccgagaccccactccactccacagagcggcaagactgttgatcaatagtcaattagaaaatggtgatttcccacaacaagagattatgggtgttttcaacaagaactgcatgattacttacgctgcttacagaaatatcttccccatttgggcgcttggcgaatactgtcatagagttttaaaccaacaccgctcctctccactcttctaa

SEQ ID NO: 24 - DNA, 2280 bp, Artificial Sequence
  Synthetic
atgtggcgtttaaaggttggtgccgaatctgtcggagagaacgatgaaaaatggttgaagtcaatttccaatcatttgggtagacaagtttgggaattttgccctgacgctggtactcagcaacaattgttacaagtccacaaggctagaaaagcattccacgatgacagattccatagaaagcaatcctctgacttgtttatcaccatacaatacggtaaagaagttgaaaacggtggtaagacagctggtgtcaagttgaaagaaggtgaagaggttcgtaaggaagccgttgagtcttctttagaaagagcattgtccttctattcctcaatccaaacttcagatggtaactgggcttctgatttgggtggtccaatgttcttgttgccaggtttggttattgctttatacgtcactggtgtcttaaattccgttttgtctaaacaccatagacaagagatgtgtagatatgtttacaaccaccaaaatgaagacggtggttggggtttgcacattgaaggtccatctaccatgtttggttcagccttaaactacgttgctttgagattgttgggtgaagatgctaacgctggtgcaatgccaaaggctcgtgcctggatcttggaccatggaggtgctactggtataacctcttggggtaagttatggttatccgtcttgggtgtctatgaatggtctggtaataaccctttgccaccagaattttggttattcccatacttcttaccattccacccaggtagaatgtggtgtcattgtagaatggtctatttgcctatgtcttacttgtacggtaagagatttgttggtccaatcacacctattgttttatctttgagaaaggaattatacgccgtcccatatcacgaaattgattggaataaatcaagaaacacctgtgctaaggaggacttgtactaccctcatccaaaaatgcaggatattttgtggggttccttgcaccatgtttatgaaccattattcactcgttggcctgctaagagattgcgtgaaaaggccttgcaaactgctatgcaacacatccactacgaagatgaaaacactagatacatctgtttgggtccagtcaataaggtcttgaacttgttatgctgttgggttgaagacccatactccgacgcttttaaattacacttgcaaagagttcatgattacttatgggttgctgaggatggtatgaagatgcagggttataacggttctcaattgtgggacaccgcattttcaatacaggctattgtctctactaagttagtcgataattatggtccaaccttgagaaaggctcatgacttcgttaagtcctcccaaatccaacaagattgtccaggtgacccaaacgtctggtacagacacattcataaaggtgcttggcctttctctactcgtgatcatggttggttaatctccgattgcaccgctgaaggtttgaaggcagccttgatgttgtccaagttaccatctgaaactgttggtgaatctttggaaagaaacagattgtgtgacgccgttaatgttttgttgtccttacaaaacgataatggtggatttgcctcttacgaattaacaagatcatacccatggttggagttgattaacccagctgaaacattcggtgatatcgtcattgattatccatacgtcgaatgcacctctgctaccatggaagctttgactttgtttaaaaagttgcacccaggtcatagaaccaaggaaattgacactgctattgttagagcagctaacttcttggaaaacatgcaacgtactgacggttcttggtacggttgttggggtgtttgttttacatacgccggttggttcggtatcaagggtttggttgccgcaggtagaacctacaacaattgtttggctataagaaaagcttgtgacttcttgttatccaaggaattgccaggtggtggttggggtgaatcatacttgtcctgtcaaaataaggtttatactaatttggaaggtaacagacctcacttggttaataccgcctgggtcttaatggctttgatagaagctggtcaagctgaaagagacccaactcctttacaccgtgctgcaagattgttgatcaactcacagttagaaaatggtgattttcctcaacaagagataatgggtgttttcaacaagaattgcatgattacctatgccgcttatcgtaacatcttcccaatttgggcattaggtgagtactgtcatcgtgttttaacagagtaa

SEQ ID NO: 25 - DNA, 2298 bp, Artificial Sequence
  Synthetic
atgtggagattaaaagttggtgctgatacagtcccagccgacccttccaatgctggaggttggttgtcaactttgtctaaccacttgggtcgtcaagtttgggaattttgcgcagagttaggttctccagaagatttgcagcaaatccaacatgctagacaaagattctctgaccacagattcgaaaagaagcattccgccgatttgttaatgagaatgcaatttgctaaggaaaactcttcattcgtcaacttgccacagattaaagttaaggacaaagaagatgttatagaggaagctgttacccgtactttgagaagagcaattaatttttactccaccatccaagctgatgacggtaactgggcctctgatttgggtggtccaatgttcttattgccaggtttggtcattgctttatatgttactggtgtcttgaactctgttttgtccactgaacaccaacgtgaaatatgtagatacttatataatcatcagaacagagacggaggttggggtttgcacatcgagggtccttctaccatgttcggttcagtcttgaattacgttactttgagattattaggtgaagaagctgaagatggtcaaggtggtgttgacaaggccagaaagtggattttggatcacggtggtgctacagctattacctcctggggtaaaatgtggttatctgtcttgggtatctacgaatgggccggtaataacccattaccacctgaattgtggttgttgccatatttgttgccatgtcatcctggtagaatgtggtgtcactgtcgtatggtttacttaccaatgtgctacttgtatggtaaaagatttgtcggtccaattaccccaatcataagatcattaagaaaggagttgtacttggtcccatatcacgaagttgactggaacgaagccagaaatcaatgtgctaaggaagacttgtactacccacatccattagttcaagatgtcttatgggcttccttgcaccatgtttatgagccattgttcatgagatggcctgctaagagattgagagaaaaggctttgagatccgttatgcagcatatccactacgaagatgaaaactctcgttatatttgtttgggtccagtcaataaggtcttaaacatgttgtgttgctgggccgaagatcctcactctgaagcattcaagttgcatatcccaagaatctacgactacttgtggattgcagaagacggtatgcgtatgcaaggttataatggttcacaattgtgggacactgcattctctgttcaagctataatttctaccaagttggctgaagagtacggtactaccttaagaaaagctcacaaatatatcaaggattctcaagttttggaagattgtcctggtgacccaaacgtttggtttagacacattcataagggtgcttggccattttccacacgtgatcacggttggttgatctctgattgtactgccgaaggtttgaaggcctcattaatgttatctaagttgccatccaaaattgtcggtgaaccattagagaaggaaagaatatacgatgctgttaacgtcttgttatccttgcagaacgaaaacggtggtttcgcttcctacgaattaactagatcatatccatggttggaattaattaatccagccgaaacttttggtgacattgttattgactacccatatgtcgaatgtacctccgctgctatccaagccttggctgccttcaagaaattgtacccaggacacagatctaatgagataggtaactgtatcgctaaggccgcagatttcatcgaatctatccaagctactgatggttcttggtacggttcttggggtgtttgtttcacatacgctggttggtttggtattaagggtttggttgctgccggtagaacctataataactgttcatctttaagaaaagcatgcgacttcttattatcaaaggaattggccgctggtggttggggtgaatcctacttgtcttgccaagacaaagtctacactaatatcaaggatgaccgtcctcacattgttaacaccggttgggctactttgtccttgattgacgctggtcaagctgaaagagatccaacccctttgcaccgtgccgctagagttttaattaactctcaaatggacgatggtgactttccacaagaagagattatgggtgtcttcaacaagaattgcatgatcacttatgccgcttatagaaacatatttccaatatgggctttgggtgagtacagatgtcgtgttttacaagcaccataa

SEQ ID NO: 26 - DNA, 2277 bp, Artificial Sequence
  Synthetic
atgtggcgcttaaagattgcagagggtggaaacccgtggctgagaactaccaatgatcatgtcgggcgtcaagtttgggaatttgaccctgaattgggttcaccagaagaattgtctgctatagaattggctcggagagatttcacgaaaaacagattcgaacacaagcacagcgccgacctattaatgaggatccagttttccaaggagaatccattggaaagagtgcttccccaagtaaaattgaaggaaaaagaagatgttacaaaggaagctgttaagagtaccctagaaagagcgctttctttctactccgctgtccaaacttcggacggcaactgggcctctgacttaggtggtccaatgttcctcttgccaggtttggtcattgcactatctgttactggtgctatgaacgctgttctttccgaacaacataagtccgagatgagaagatatttatacaatcaccaaaacgaggatggtgggtggggcttgcatatcgaaggtcctagtacaatgtttggttcagtattgtcttatgtcaccctgagattgttgggtgaaggtgctaatgatggtgaaggtgccatggaaaaaggtagagattggattgtcaatcacggtggagccaccgctatcacttcttggggtaagatgtggttaagcgttttgggtgtctttgaatggagtgggaacaacccattgccaccagagatttggttgctgccttacatgttaccaatccatccgggtcgtatgtggtgccactgtagaatggtttacttgcctatgtcttatctatacggcaaaagattcgtcggtccaataactccaactgttttgtctttacgaaaggaattgttctccacgccctatcacgaaattgactggaatagagcgagaaacgaatgtgcaaaggaggacttatactacccacatccattgattcaagacttgctttggggttctctacacaactttgtggaacctatcctcatggcttggcctggaaagaagctaagagaaaaagcattgcgcaccaccctggaacacatccactatgaagatgaaaatactcgttacatttgtttgggtccagtgaacaaggttttgaacttgttgtgctgttgggtagaagacccatacagcgatgctttcaaattgcatttacaaagagtccacgattatttgtgggttgctgaggatggcatgaagatgcagggttacaacggttcgcaattgtgggacactgccttctccatccaagctatcctgtctacaaacttaattgaagaatacgcttcgacccttaaaaaggctcatgcctttgttaaagactcacagatacaagaagattgtccaggtgatccaaacgtttggttcagacatattcacaagggtgcttggccattctccaccagagaccacggttggcttatctctgattgtactgccgagggtcttaaggcttcgttgatgttatctaagctgccctcaacgatggtgggcgaaccactagaagctaataggttgtgtgacgccgtcaatgttcttctgtcattacaaaatgacaacggtggttttgcttcctacgaattgactcgttcctacccatggctcgaacttataaatcctgctgaaacattcggtgacattgttattgattacccatatgttgaatgcacatccgctaccatggaagcactgactctcttcaagaagttacaccccggtcatagaactaaagagattgacacctgtatcaagaaagccgtcgcgtttttggaaaaaatgcaaagagcggatggttcatggtatggttgttggggtgtttgttttacttacgctggttggtttggaatcaaggggttggttgctgctgggcggacctacaactcttgtttggccataagaaaggcttgcgagttcctcttgtcaaaggaattaccaggtggtggttggggtgaatcttatttgtcttgtcaaaataaagtctacactaacttggaaggtaacaagccacatttggtaaacaccgcctgggtcttgatggctttgattgaagccggacaagccgaaagagatccagctccactgcacagagctgctaggtttttaattaactctcaaatggaaaatggtgacttccctcagcaagagatcatgggggtgtttaacaggaattgcatgatcacgtattcggcttatagagatatcttccctatttgggccttgggtgaataccgcacgaaggttttgcatgccagcagctaa

SEQ ID NO: 27 - DNA, 2280 bp, Artificial Sequence
  Synthetic
atgtggcgtttaaaaatctcggagggaggcaatccttggttgaggacgacaaacaaccacgtcggtagacaggtgtgggaatttgacccagaactaggtagtccagaagaactctctgccattgaattggcacgaagagatttcaccaagaatagattcgaacaaaagcattcagcggaccttctgatgagaatacaattttctaaggagaaccccttggaaagagttttgccacaagtaaaattgagagaaaaggaagatgttactaaggaagctgtcaaaagcaccttagagagagctttgtccttctactctgctgttcaaacttccgatggtaattgggctagcgacttaggtggtccaatgtttctactgccaggtctagttatcgccttgtctgtcaccggtgctatgaacgctgttttatcagaacaacacaagtctgaaatgtgccgctatctttacaaccatcaaaacgaagatgggggttggggcttgcacattgaaggtccttccactatgttcggttcggttttgtcttatgtcactcttagattgttgggtgaaggaccgaacgacggtgaaggtgctatggggaagggacgggattggattttaaatcatggtggggctacagcaatcacctcctggggtaaattgtggttgagcgtcttgggtgtgttcgagtggtctggaaataacccactcccacccgaaatctggttattaccttacatgctaccaattcacccaggtaggatgtggtgtcactgtagaatggtttacctgccaatgtcctatttgtacggtaagagatttgttggtccgataactccaacagttttgtctttgagaaaggaattgttctccactccatatcacgagatcgattggaatagagcgcgtaacgaatgtgccaaggaagacttatactacccacatcctttaattcaggacttattgtggggttcattgcacaacttcgtagagccaattttgatggcatggccgggtaaaaaattgagagaaaaggctctgcggaccaccctagaacatattcattacgaagacgaaaacacaagatatatatgcctgggtccagtcaataaggtcttgaaccttttgtgttgttgggttgaagatccttacagtgacgcctttaagttacacttacaacgtgtacacgattacttgtgggtcgctgaagacggtatgaagatgcaaggctacaatggttctcaactctgggatactgctttctccatccaagctattttgtcaactaacctcgtagaagaatacgcctccacattgaaaaaggctcacacctatgttaaagacagccaaatccaggaagattgtccaggcgatcctaatgtttggtttagacatatacataagggtgcctggccattctctactagagaccatggttggttgatttcagattgtacagcagaaggcttaaaggcttcactaatgctttctaagttgccatctactatggtcggggaaccattggaagctaaccggctctgcgacgctgttaatgtcttgctatcgttacaaaacgacaacggtggtttcgctagctatgagttgaccagatcttacccatggttggaactgatcaatcctgcggagacatttggcgatatagttattgactacccgtatgtcgaatgtaccagtgccactatggaagctcttactttatttaaaaagttgcaccctggtcaccgtacgaaggaaatcgatacctgcattaaaaaagctgtcgccttccttgaaaagatgcaaagagctgatggttcttggtatggttgttggggtgtttgtttcacttacgcaggatggttcggtatcaagggtttagtcgcggctggtagaacgtataattcctgtttggctatcaggaaggcgtgcgaatttttgctaagtaaagaattgcccggtgggggctggggtgaatcttaccttagttgtcaaaacaaggtatacaccaacctagaaggtaacaagccacatcttgttaacactgcttgggtgttaatggctttgattgaggctgggcaagccgagagagatccggccccattgcacagagcagctagattcttgattaactcccagatggaaaacggtgattttccacaacaagacatcatgggtgtttttaatcgcaactgtatgataacctatgctgcttacagggacattttcccaatttgggctttgggtgaataccgtactaaggttttgcacgcaagcccttcctaa

SEQ ID NO: 28 - DNA, 2289 bp, Artificial Sequence
  Synthetic
atgtggagattaaaagttggtgcagagtccgtcggggaaaacgacgaaaagtgggttaagtctatatcaaatcatttgggtcgtcaggtctgggaattttgcccagatgctggtacccctcaacaattgttgcaaattgaaaaggccagaaaagctttccaagacaacagattccacagaaagcaaacttctgatttattggtttctatccagtgtgaaaaaggtactacaaacggtgctagagtcccaggtaccaagttgaaggagggtgaagaagttcgtaaggaagccgttaagtccactttggaaagagctttatccttttattcttcaatccaaacatctgacggtaattgggcttctgatttgggtggtccaatgttcttattgccaggtttggttattgccttatgtgtcaccggtgctttgaactccgtcttgtccaaacaccatagacaagagatgtgtagatacttgtacaatcaccaaaacgaagacggtggttggggtttacatattgaatccccatctactatgtttggttccgcattgaactacgttgctttgagattattgggtgaagatgccgatggtggtgaaggtcgtgctatgaccaaagctagagcctggatcttggggcacggtggtgctaccgccatcacttcttggggtaagttatggttatcagtcttgggtgtctatgaatggtctggtaataatcctttaccacctgaattttggttgttgccatacttcttgccattccaccctggtagaatgtggtgtcattgcagaatggtttatttaccaatgtcctacttgtacggtaagcgtttcgttggtccaataactccagtcgttttgtctttgagaaaggaattgtatactgttccttaccacgagattgactggaacaagtcaagaaacacctgtgctaaagaagatttatattacccacattctaagatgcaagatattttgtggggttctattcaccatatgtacgagccattgtttacccactggcctgctaaaagattgagagaaaaggctttgaagacagcaatgcagcacatccattacgaagacgaaaatactagatatatctgtttgggtccagttaacaaggtcttaaatatgttgtgttgctgggttgaagacccatattctgaagccttcaagttgcacttacaaagagtccacgattacttgtgggttgctgaagacggtatgaaaatgcaaggttacaacggttcacaattgtgggacaccgcattctccgttcaagctattatctctactaagttagtcgataactacggtccaactttgcgtaaggctcatgactatgtcaaaaactctcaaatccaacaagattgtccaggtgaaccaaacgtctggttcagacacattcacaagggtgcttggccattctccaccagagatcacggttggttgatttctgattgcacagctgaaggtttaaaagcatctttgatgttatccaagttgccttccgagacagttggggaacctttagaaagaaatcgtttatgtgatgccgttaatgttttgttgtccttgcagaacgacaatggtggttttgcatcatatgaattgactagatcttacccttggttggagttgattaacccagctgagacttttggtgacatcgttattgattacccatatgttgaatgtacttctgccaccatggaagctttagctttgttcaagaaattgcatccaggtcaccgtaccaaagaaatcgacacagcaatcgctcgtgctgctgattttttggagaacatgcaaagaactgacgggtcttggtacggttgttggggtgtctgtttcacttacgctggttggttcggtattaagggtttggtcgctgccggtagagcatattccaactgtttggctattagaaaagcctgtgatttcttattgtcaaaggaattgccaggtggtggttggggtgaatcttacttgtcctgtcagaacaaggtttatactaacttagaaggtaatagaccacacttggttaataccgcctgggttttaatggctttgatagaggctggtcaaggtgaaagagatcctgccccattgcacagagcagctcgtttattgatcaactctcaattggaaaacggtgattttccacaagaagaaatcatgggtgtctttaataagaactgcatgattacctacgctgcatatagaaacatattcccaatctgggctttgggtgagtactgtcatagagttttaactgaataa

SEQ ID NO: 29 - DNA, 2112 bp, Artificial Sequence
  Synthetic
atgggttctaataacttcgtcggccgtaagatgtggagattaaaattgggtgaaggtgcaaacaatccttatttgtggtcatccaacaactttgttggtagacagacttgggacttcgaggccgatgaaggtacaccagaagaaagagctcaaatagaagctgctagaaagacctactttcaaaacagattcaaagttcaatgttctaatgatttattctggaagtttcaagttttcgccttctacattactggtcatttgggtaccatctttccagaggaacaccaaaaggaattgttacgttatgcttactgccaccagaacgaagacggtggttggggtttgtacattatgggtgagtcctgtatgttatgtactgtcttgaattatatccaattgagattgttgggtgaagaaccagataccgacgcttgtaacagagcccgtaagtggattttggatcatggtggtgctttatacattccttcttggggtaagatctggttgtccatattgggtgtttacgaatgggacggtgctaacccaatgccaccagaattttggttattcggtaatgctttaccattgaaaccaggtcacttgttgggttactctcgtttgactttattgccaatgtcctatttatatggcaagagatttgtcggtacattaactcctttgattttgcaattgagacaagagatctacacccaaccatactctaatatcaaatggtcacctgccagacactactgtgctaaggaagataagtgcttcgaaagatcatggattcaaaagttggcatgggacgctgttcattacttaggtgaaccattgttgggctcttgggcattcaaatctgttagaaacagagctttgcaaattgccagatttcatatcgattatgaagaccaaaattcccactacatcacaatcggttgtgtcgaaaagccattgtgtactttggctacctgggtcgacgatccaaacggtcaggcctacaagaagcacttagctcgtgttaaggattacttgtggattggtgaagacggtatgaaaatccaatcattcggttctcaatcttgggatgttgctttcgctattcaagccattttggctaccaactttcatagagaattttctgatactttaaaaaagggtcatgatttcataaagaagtcccaaattagagagaatccttctggtgatttccaatccatgtatagacacatctcaaaaggttcctggtctttctctgaccaagatcacggttggcagttgtccgactgcactgctgaaaacttaacttgttgcttaatcttatctacaatgccaccagatatggtcggtgaccctatgaagccacaatgttttttcgatgcagttaatattatcttgtccttacaggccaagaacggtggtgtctccgcttgggaacctaccggtatcgtttcatcttggtttgaaagattgaatccagttgaatttttagaatattctattttggaattggaatacgtcgaatgtacttcttcctctttgcaagccttggttttgttcaaaaagttattcccaaaccacagaaaaaaagaaatcgagactttcataaccaagggtgtcaactatattaaggaaatgcaaaaagacgatggttcttggtacggtaactggggtatttgtcatttgtacgctacctacttcgcaattaaaggtttagttgctgttggttactcttacgactcctgttccacaataagaagaggtgtcgactttttgttaaagatccaatgtccagatggtggttggggtgaatcacatgtctcagtcaccaagaaggtttatactcctttgcaacacaacgcttccaacttggttcaaacttcattcgctttgatggctttgatccacgctcaacaagccaatagagatccaacaccagttcacagagcagctaagttgttgataaactctcaattagaagacggtgactaccctcaacaagaaattactggtgcatttatgggtaattgtatgttgcattatccattgtataaaaacgtcttcccattgtgggctttggccgattattgcaacttggttcctttgccataa

SEQ ID NO: 30 - DNA, 2271 bp, Artificial Sequence
  Synthetic
atgtggaaactaaaggtggcagagggtggcaccccatggttacggacattgaacaatcacgttggacgtcaagtctgggaatttgaccctcattctgggtccccacaggatttggatgacattgaaactgccagaagaaacttccacgataaccgattcacgcataagcacagtgacgatctgcttatgagattgcaatttgctaaggaaaatcccatgaacgaagttttacctaaagtaaaggttaaggatgtcgaagacgttactgaagaggctgtcgctaccactttgagaaggggtctcaacttctattcgaccatacaatctcacgacggtcattggccaggtgatttgggtggtccaatgtttcttatgccaggtttggttatcactttgtcagtaaccggtgctttaaatgccgtcttaacagatgaacatagaaaagaaatgagaagatacttgtacaatcatcaaaacaaggacggtggctggggtttgcacatcgagggtccgagcacaatgttcggatctgttctgtgttatgtcactttgagattgcttggtgaaggtccaaacgatggtgaaggggacatggaacgtggtagagactggattttagaacacggtggtgcgacttacatcacgagttggggtaagatgtggctaagcgttttgggcgtctttgagtggtccggtaacaatccaatgccaccagaaatttggctacttccttacgctctaccagttcacccaggtagaatgtggtgccactgtagaatggtatatttgcccatgtcctacttatacggcaaacgcttcgttggtcccattacccctacggtgttgtctttgaggaaggaattgttcactgttccatatcatgacattgattggaaccaagctcgcaatctttgtgcaaaagaagatttgtactatccacatccattggtccaggatatcctgtgggccaccttacataagtttgttgaaccagtcttcatgaactggccgggtaagaaattaagagagaaggctataaaaactgccattgaacacatccactacgaagacgaaaatacacgttatatatgtatcggacctgtcaacaaggttctcaacatgttgtgttgctgggttgaggatccaaattctgaagctttcaagttgcacttaccaagaatttacgactacttgtgggtggctgaagatggtatgaagatgcaaggttataacggttctcaattatgggacaccgcgtttgctgcccaagctataatcagtactaatttaattgatgaatttggaccgactcttaagaaggctcacgcattcattaagaactcacaagtgtccgaagattgtccaggtgacttgtctaagtggtacagacatatctcaaagggggcctggcccttttccaccgctgaccacggttggccgatctctgattgtaccgctgaaggtttgaaggctgttttgctactatccaagattgcgccggaaattgtcggtgaaccactggactctaaacgtttgtacgacgccgtgaatgttatcttgtccttacaaaacgaaaacggtggcctcgctacttatgagctaacgagatcctacacttggttggaaattattaatccagctgaaacattcggtgacattgttatagactgcccatatgtagagtgtacctctgctgctatccaggcactagccaccttcggcaaactatacccaggtcatcgaagagaagaaatacaatgttgcatcgaaaaagctgtcgcgttcattgaaaaaattcaagcttcagatggttcatggtacggttcttggggagtctgtttcacttacgcaacttggtttggtatcaaaggtttgatcgctgccggtaagaacttctcgaactgtttgtctataagaaaggcttgcgaatttttgttgtccaagcaattgcctagcggtggctgggccgaaagttatctttcctgtcaaaataaggtttattctaatttagaaggtaacagatcgcacgttgtgaacacaggttgggctatgttggcattgattgaagccgagcaagctaagagagatccaacgcctttgcaccgtgcggctgtttgtttaattaactctcaactcgagaacggcgatttccctcaggaagaaatcatgggtgtctttaacaaaaattgtatgattacttacgccgcttaccgttgtatttttccaatctgggctcttggtgaatacagaagagttctgcaagcctgctaa

SEQ ID NO: 31 - DNA, 2295 bp, Artificial Sequence
  Synthetic
atgtggcgtttgaaagtcggagccgagagtgttggcgaagaagatgaaaagtgggtgaagtccgtttctaaccacttaggtaggcaggtatgggaattttgtgctgacgcggcagccgacaccccacatcaactgttgcaaatccaaaatgctagaaaccacttccatcacaatagattccatagaaagcaatcgtctgatctttttttggctatacaatatgaaaaagaaattgctaagggtgctaagggtggtgccgttaaagtcaaggaaggtgaggaagtcgggaaagaagctgttaagagcacactagaaagagctttgggtttctactccgctgtacaaactagagatggtaactgggcatccgacctaggtggtcccttatttttgttacctgggttggttattgcgctccacgtcactggtgttttgaatagtgtcttgtctaagcatcaccgtgttgaaatgtgcagatacctatacaaccatcagaacgaggatggtggttggggtttgcacatcgaaggcacctctaccatgttcggttcagcccttaactatgtcgctttaagactgctcggagaagacgctgacggtggggatggtggtgccatgacgaaggctcgagcttggattttggaacgcggtggtgccactgctatcacatcttggggcaaattgtggttgtcagttttaggtgtttacgaatggagcggtaataatccattaccaccagaattttggttgctaccgtactcattgccattccaccctggtagaatgtggtgtcattgtagaatggtctatttgccaatgtcctacttgtacggaaagagattcgttggtccaataactcctaaagttctttctcttagacaagaattgtatacaattccataccacgaaattgactggaacaagtctcgcaatacctgcgccaaagaggatctgtattacccacatcctaagatgcaagacatcttgtggggttctatttaccatgtgtacgaaccattatttactcggtggccgggcaagaggttaagagagaaagcccttcaagctgcaatgaagcacatccactatgaagatgaaaactcgcgttacatatgtttgggtccagtcaacaaggtcttgaacatgctttgttgttgggttgaagatccatattccgacgcattcaaattgcatttgcagagagtgcacgactacttatgggttgctgaagatggcatgagaatgcaaggatacaatggttcgcaattgtgggacactgctttcagtatccaagctattgttgctaccaagttagtcgattcctacgctcctaccttaagaaaggcccacgatttcgttaaggattcccaaattcaggaagattgtcccggtgatccaaacgtgtggtttcgacacatccataaaggtgcatggccattgtctactagagaccatggttggttaatctctgactgtacggctgaaggtctcaaggcctccttgatgttgtctaaattaccttcgactatggtaggtgaaccactggaaaagaacaggttgtgcgacgctgttaacgttctattatcactccaaaatgacaacggcggtttcgcctcttatgagttgactagatcatacccatggttggaattgattaatccagctgagaccttcggtgacatcgttatcgactatccatacgtcgaatgcactgccgctacaatggaggctttgactttattcaagaaactgcaccctggtcatagaacgaaggaaattgatactgccattggtaaggctgctaattttctggaaaaaatgcaacgtgcagatggtagttggtatggctgttggggtgtctgtttcacctatgctggttggtttggtataaagggattagttgctgcgggtagaacctataattcttgtcttgcgatcagaaaagcttgtgagttcttgctatctaaggaattgcccggaggtggctggggtgaaagctacttgtcctgtcaaaacaaggtctacaccaacttggaaggtaacaagcctcacttggttaacactgcttgggtattaatggccttgattgaagctggacaaggggaaagggatccggcgccattacatagagctgcaagattgctaatgaacagccaattggaaaatggtgatttcgtacaacaggaaattatgggtgtattcaataagaattgcatgattacgtacgccgcctatcgtaacatctttccaatctgggcgctaggtgagtactgtcatcgagtgctaacggaataa

SEQ ID NO: 32 - DNA, 2295 bp, Artificial Sequence
  Synthetic
atgtggcgtttgaaggttggtgctgagtctgtcggagaaaaagacgaaaagtgggtcaaatccgtttcaaatcacttaggtagacaagtttgggaattttgcgccgatgctgatgcagttacccctcatcagtctttgcaaattcacaacgctagaaaccatttccaccaaaatagattcagaagaaagcaatcttccgacttgtttttagctatacaatatgaaaaggagatcgccaagggtgttaaggtcggtgctgttaaagtcaaagaaggtgaagaagttggtaaggaagcagtcaagtctacattggagcgtgctttgtcattctactccgctgtccagacttctgatggtaactgggcctctgacttaggtggtccaatgttcttgttgccaggtttagttattgccttgtacgttactggtgttttaaattccgtcttgtccaagcaccatagattggaaatgtgtagatatttatacaaccatcaaaacgaagatggtggttggggtttgcacatcgaaggttcttccaccatgtttggttcagctttgaactacgtcgctttaagattgttgggtgaagacgttgatggtggtgatggtggagctatgactaagggtagagcatggattttggaccgtggttctgccactgccatcacctcttggggtaaattatggttgtccgttttgggtgtctacgagtggtccggtaacaacccattacctccagaattttggttgttgccatattctttaccattccacccaggtagaatgtggtgtcactgtagaatggtttacttgccaatgtcatatttgtacggtaagagattcgttggtcctataacaccaattgtcttatctttgagaaaggaattgtacaccgttccttaccatgaaatcgactggaataagtccagaaatacttgtgctaaagaagacttgtattacccacacccaaaggtccaagatattttgtggggtactatccaccatgtttacgaaccattgttctctggttggccatgcaaacgtttgagagaaaaggctttgcaaactgccatgaaacacattcactacgaagatgagaactctaactatatctgtttaggtcctgttaacaaggttttgaatatgttatgttgctgggttgaagacccatattcagacgcttttaagttgcatttgcaaagaatccatgatttcttatgggtctctgaggatggtatgaagatgcaaggttacaacggttcacagttgtgggataccgctttttccattcaagccattgcttctacaaagttggttgacacatacggtcactcattaagaaaagcacacaatttcgtcaagaactctcaaatacaacaggattgtccaggtgattccaatgtctggtttagacacatacataaaggtgcttggccattctctacccgtgatcacggttggttaatctccgactgtactgctgaaggtttaaaagcttcattgaccttatctaagttgccatcccaattggttggtgaacctttggaaaagaacagattgtatgacgcagttaatgtcttgttgtcattacaaaacgaaaacggtggtttcgcttcctacgaattaactagatcttatccttggttggagttgattaacccagcagaaacttttggagatattgttatcgattattcttacgttgaatgcactgctgccaccatggaggctttggcattattcaagaagttacacccaggtcatcgtaccaaggaaatcgatacctgtattgctaaggccgccaacttcttggaaacaatgcaaagaactgacggttcttggtatggttgttggggtgtttgtttcacctacgctggttggtttggtatcaaaggtttgatcgctgctggtagaacatacaagacctgtattgctataagaaaggcctgcgattttttattgtctaaagaattgcctggtggtggttggggtgaatcttacttgtcatgtcaaaacaaggtctacactaatttggagggtaatcgtccacacttggtcaatactgcttgggtcttgatggccttgattgaagctggtcaagctaaaagagaccaggccccattgcatagagccgctcgtttattaattaattcacaattggaaaatggtgacttccctcaacaagaaataatgggtgtttttaacaagaattgtatgatcacttatgctgcttacagaaacatctttccaatttgggccttgggagagtattaccatagagttttgactaaataa

SEQ ID NO: 33 - DNA, 2280 bp, Artificial Sequence
  Synthetic
atgtggagattgaaagtaggtgctgaatccgtaggtgaaaacgacgaaaagtggttgaaaagtataagtaatcatttgggtagacaagtctgggaattttgtccagatgcaggtacacaacaacaattgttgcaagtacataaggctagaaaggcatttcatgatgacagattccacagaaagcaatcttcagatttgttcatcaccatccaatacggcaaggaagtagaaaacggtggcaagactgctggtgttaaattgaaggaaggtgaagaagttagaaaagaagcagttgaatccagtttggaaagagccttgtctttctactcttcaatccaaacctctgatggtaattgggcatcagacttgggtggtccaatgttcttgttacctggtttggtcattgccttgtacgtaactggtgttttgaactctgtattgtcaaagcatcacagacaagaaatgtgtagatacgtttacaaccatcaaaacgaagatggtggttggggtttgcacattgaaggtccatccactatgtttggtagtgcattgaattatgtcgccttaagattgttaggtgaagatgcaaacgccggtgctatgcctaaggcaagagcctggatattagaccatggtggtgctactggtatcacatcctggggtaaattgtggttaagtgtcttaggtgtatatgaatggtctggtaataacccattgccacctgaattttggttgttcccttactttttaccattccatcctggtagaatgtggtgtcactgcagaatggtttacttgccaatgtcttacttgtacggcaagagattcgttggtccaataacacctatcgtcttgtcattgagaaaggaattgtacgcagttccttaccatgaaatcgattggaacaagtccagaaacacctgtgctaaggaagatttgtattacccacaccctaaaatgcaagacattttgtggggtagtttacatcacgtttacgaaccattatttactagatggcctgctaaaagattgagagaaaaggcattacaaacagccatgcaacatatccactacgaagatgaaaacaccagatacatctgcttgggtccagttaacaaggtcttgaacttgttgtgttgctgggttgaagatccttattctgacgctttcaagttgcatttgcaaagagtacacgattacttgtgggttgcagaagacggtatgaaaatgcaaggttacaatggttcacaattgtgggatacagctttttccattcaagcaatagtcagtactaagttggtagataactacggtccaacattaagaaaagctcatgacttcgtaaagtccagtcaaatacaacaagattgtccaggtgaccctaatgtttggtatagacatatccacaaaggtgcatggccattttctaccagagatcatggttggttgatttcagactgtactgctgaaggtttgaaggctgcattgatgttgtctaagttgccatcagaaactgttggtgaatccttggaaagaaatagattatgcgatgccgttaacgtcttgttgagtttgcaaaacgacaacggtggtttcgcttcttacgaattgactagatcatacccatggttggaattaattaatcctgctgaaacattcggtgatatcgtcattgactatccatacgtagaatgtacctccgctactatggaagcattgaccttgttcaagaagttgcatcctggtcacagaacaaaggaaatcgataccgcaattgttagagccgctaatttcttggaaaacatgcaaagaacagacggttcttggtatggttgttggggtgtttgctttacctacgctggttggttcggtattaaaggtttagtcgcagccggtagaacatacaataactgtttggccataagaaaagcttgcgatttcttgttatctaaggaattaccaggtggtggttggggtgaatcctacttgagttgtcaaaacaaggtttacactaatttggaaggcaacagacctcatttagttaacacagcctgggtcttgatggctttaatcgaagccggtcaagctgaaagagatccaactcctttgcatagagctgcaagattgttgatcaactcacaattggaaaacggtgattttccacaacaagaaatcatgggtgttttcaacaagaactgcatgataacatatgccgcttacagaaacatttttcctatatgggctttgggtgaatactgccacagagtcttgaccgaataa

SEQ ID NO: 34 - DNA, 2280 bp, Artificial Sequence
  Synthetic
atgtggaggcttaaagtaggcgcggaatcagtcggggagaatgacgaaaagtggctgaaaagcattagtaaccacttgggtcgccaggtgtgggaattttgcccagatgcaggtacgcaacaacaactattacaggttcataaggctagaaaagccttccatgatgaccgttttcacagaaagcaatcgtccgatttattcatcaccatacaatatggaaaagaggttgaaaatggaggtaagacagctggcgtaaaactcaaggagggtgaagaagttagaaaggaggcagtcgaatcttctttggaacgggctttatcgttttactcttcaattcaaacttccgatggtaactgggccagtgacctgggtggtccgatgtttttactacccggcttggttatcgccctttatgtaaccggcgtcctgaatagcgtgctatccaaacatcataggcaggaaatgtgtcgatacgtttataaccaccaaaatgaggatgggggttggggattacatattgaaggaccttcaacaatgttcgggtctgcacttaattatgtcgctttgagactcttaggcgaagacgcaaacgctggtgccatgccaaaagcaagagcgtggatattggatcacggaggtgcgactggtatcacgtcatggggcaaactttggctctcggttttaggagtgtacgagtggagtggcaataatcctctaccacctgaattttggctgtttccttatttcttgccgttccatcccgggcgaatgtggtgtcattgcagaatggtatatttaccaatgagttacctctatggtaagcgttttgtaggtccaattactcctatagttttgtctttacgcaaagaactatacgctgtcccataccatgagatcgattggaacaagtcgcgtaatacatgtgctaaagaagatctttattacccccacccgaaaatgcaggacattctgtgggggtcattgcatcacgtttatgagcccttatttaccagatggccggcgaaaagactaagggaaaaggctttgcaaactgccatgcaacatatacactacgaagatgaaaacacaagatacatttgtttagggcctgtaaataaagtgttgaatttactttgctgttgggtagaagacccatatagcgatgcatttaagctccatttgcagagggttcacgactatttatgggtcgctgaagatggaatgaaaatgcaaggttataatggatctcaattgtgggacacagcatttagcattcaggccattgtctctactaaactcgttgataactacggcccaacgctacggaaggcccatgatttcgtgaaaagcagtcagatacaacaagattgccctggcgatccaaacgtgtggtataggcatatacacaagggtgcttggccattctcaacaagagatcatggttggctgatctccgattgtacagctgagggattaaaggcggcattaatgttgtctaaattaccgagtgaaaccgttggtgagagcttggaaagaaatagactgtgtgatgccgtgaatgtgttgctttccctgcaaaatgacaatggaggtttcgcgtcgtatgaactaactcgatcttatccttggttagaacttatcaaccccgcagaaacctttggggatattgttatcgattatccatacgtggagtgtacttcagcaaccatggaggctttgacactgtttaaaaaacttcatcctggacatcgtactaaggaaattgatacggccatagtacgcgcagctaactttctagaaaatatgcaaagaactgatggtagttggtacggttgctggggcgtttgtttcacttacgctggctggtttggaattaaaggtctagtagctgccggacgtacatataacaattgcttggccattagaaaggcttgtgactttctcttatcaaaagaactacctggtggtgggtggggagagtcttatcttagctgccagaacaaagtatatactaatttggaaggcaacaggccacaccttgttaacacagcatgggtattgatggctctgattgaagctggtcaagctgaacgagacccaacgcccttacacagagcagcaagactgctgatcaattcacagttagaaaatggtgatttccctcagcaagagatcatgggcgtttttaacaagaattgtatgattacttacgccgcatatcgtaacatatttccgatttgggcattaggggaatactgccatagggtgcttactgaataa

SEQ ID NO: 35 - DNA, 2292 bp, Artificial Sequence
  Synthetic
atgtggcgtttgaaagttggtggtgagtctgtcggagaaaaggaagaaaagtgggttaaatcaatatccaatcatttaggtagacaagtctgggaattttgccctcacgatggtacaccagaacagagattgcaagttcaaaaggcaagagacgctttcttcagaattaacagatttcgtagaaagcaatcttccgatttattcttggctatccaatatgaaaaggagatcgccaacggtgctaccgtcggtggtattaaattgaaggagggtgacgaagttagaaaggaagccgttaagtctactttagaacgtgctttgaatttttactctgctgttcagactaccgacggtaactgggcttccgatttgggtggtccaatgttcttattgccaggtttggtcatcgcattatacgttactggtgtcttgaactctgtcttgtcaaaaaatcacagacaagaaatgtgtagatatttgtacaaccatcaaaacgaagatggtggttggggtttgcacattgaaggtccttccaccatgttcggttctgctttaaactacgttgccttgagattgttgggtgaagatgccgacggtggtgacggtggtgctatgactaaggctagagcttggatcttggacagaggaggtgccaccgccattacatcttggggtaaattgtggttatcagttttaggtgtttatgagtggtctggtaataatccattaccaccagaattttggttgttgccatatttcttaccattccatccaggtcgtatgtggtgtcactgtagaatggtctacttacctatgtcctacttgtacggtaagagatttgttggtcctattactccaatcgtcttgtccttgagaaaggaattgtataccgtcccataccacgaagttgattggaacaagtccagaaatacttgtgctaaagaggatttgtactatccacatccaaagatgcaagacatcttgtggggttctatacaccatgtttacgaacctttgttttcaagatggccaggtaagagattaagagaaaaagctttacaatctgcaatgcagcacattcactatgaagatgaaaacactagatacatatgtttaggtccagttaacaaggtcttgaacatgttgtgctgttgggttgaagatccttactctgatgctttcaagttgcatttacaaagagtccatgactacttatgggtttctgaagatggtatgaaaatgcaaggttacaacggttcccaattgtgggacactgccttctcaattcaagctattgcttcaacaaagttagttgactcttatggtccaaccttgagaaaggcacacgacttcgtcaaaaactctcaaatccagcaagattgtccaggtgattccaatgtctggttccgtcatatccacaagggtgcctggcctttctctactagagaccacggatggttgatttctgattgcaccgctgaaggtttgaaggcttcattgatgttgtctaagttaccatccgaaatagtcggtccatctttggagaaaaacagattgtgtgatgcagttaatgttttgttgtctttgcaaaatgacaacggtggttttgcttcctacgaattaacccgttcttacccatggttagaattgatcaacccagcagaaacattcggtgacatcgtcattgattattcatacgttgaatgtacttccgctacaatggaagctttgaccttgtttaagaagttgcacccaggtcatagaactaaagaaattgacaccgccatcggaaaggctgccaacttcttggagaagatgcaacgtactgatggttcttggtacggttgctggggtgtttgtttcacttacgctggttggtttggtattaaaggtttggttgctgctggtagaacatacaattcctgtatagctattcgtaaggcatgtgatttcttgttgtccaaggaattaccaggtggtggttggggtgaatcttacttgtcttgtcaaaacaaagtttacactaatttggaaggtaacagacctcacttagttaacaccgcctgggtcttgatggccttgatcgaagctggtcaagctgagagagaccctgctcctttgcacagagctgccagattattgataaattcccaattagaaaacggtgatttcccacaagaagaaattatgggtgtttttaataagaactgtatgatcacctatgcagcttatagaaacatctttccaatttgggccttaggtgaatactgccatagagttttaactgagtaa

SEQ ID NO: 36 - DNA, 2328 bp, Artificial Sequence
  Synthetic
atgggtagacgtgagagatggggcggtagaagagaaataatgtggagattgaaagttggtggtgaatccgtcggtgaaaaggaagaaaagtgggttaaatctatttcaaaccacttaggtagacaagtttgggaattttgtccacatgacggtacacctgaacagcgtttgcaagtccaaaaggcaagagatgctttcagaatcaatcgtttcagaagaaagcaatcttctgacttgtttttggctatccaatacgagaaggaaattgccaacggtgctactgtcggtggtattaaattaaaggagggtgatgaagtcagaaaagaagccgttaagtccaccttggaaagagctttaaacttctattccgctgttcaaactaccgatggtaattgggcctctgacttgggtggtccaatgtttttattgcctggtttggttatcgctttatacgtcactggtgttttgaactctgttttgtcaaagaatcaccgtcaggaaatgtgcagatacttgtataaccatcaaaacgaagacggtggttggggtttgcacattgaaggtccatccaccatgttcggctctgcattaaattacgttgctttaagattgttgggtgaggatgctgatggtggtgacggtggtgctatgacaaaggcacgtgcctggatcttggacagaggtggtgctactgctataacttcatggggtaaattgtggttgtccgtcttgggtgtctatgaatggtccggtaacaatccattgccaccagaattttggttattaccatacttcttgcctttccacccaggtagaatgtggtgtcattgtagaatggtttatttgcctatgtcatacttgtacggtaagcgtttcgtcggtccaattaccccaattgttttgtctttaagaaaggaattgtacactgttccataccacgaggttgattggaataaatctcgtaacacttgtgccaaggaagacttgtactatccacacccaaaaatgcaagatatcttgtggggttctatccatcacgtctacgaaccattattttctcgttggcctggtaagagattgagagaaaaggctttacaatctgctatgcagcatattcattatgaggatgaaaacaccagatacatttgcttgggtcctgttaacaaagttttaaatatgttgtgttgttgggttgaagatccatattcagatgcatttaagttgcacttgcaaagagttcacgactacttatgggtctccgaagatggtatgaagatgcaaggttacaatggttcccaattgtgggacacagccttctctatacaagctatcgcttcaacaaagttagtcgattcttatggtccaaccttaagaaaggctcatgactttgtcaaaaactctcaaattcaacaagattgcccaggcgattccaacgtctggttcagacatatacacaagggtgcctggccattctcaactagagaccacggttggttgatttccgactgtactgccgaaggtttgaaggcttctttaatgttatctaagttgccatctgaaatcgttggtccttctttagagaaaaacagattgtgtgacgctgttaacgtcttattgtccttgcaaaacgataatggtggttttgcatcttacgaattaaccagatcctacccttggttggaattgattaatccagcagaaactttcggtgacatcgttattgactactcttatgttgaatgtacatccgctaccatggaagctttaactttgttcaagaagttgcacccaggtcatagaaccaaagaaatcgacaccgccataggtaaggctgctaacttcttggagaagatgcaacgtactgacggttcttggtacggttgctggggtgtctgtttcacttacgccggttggtttggtatcaagggtttagtcgctgctggtagaacttataactcctgtatcgctattagaaaggcatgtgattttttgttgtctaaggaattacctggtggtggttggggcgagtcttacttgtcctgtcaaaacaaagtctacactaacttagaaggtaatagaccacacttggttaatactgcatgggtcttaatggctttgattgaagccggtcaggctgaaagagacccagccccattgcatagagctgcccgtttattgattaattcacaattggagaacggtgatttcccacaagaagaaattatgggtgtcttcaacaaaaactgcatgataacctatgctgcatacagaaatatctttccaatctgggctttgggtgaatattgtcacagagttttgacagaataa

SEQ ID NO: 37 - DNA, 2274 bp, Artificial Sequence
  Synthetic
atgtggaaattgaaggtcgccgagggtggctctccatggttacgtacattgaatggtcacattggtagacaagtttgggaatttgaccctaacttgggttccccaaaggatttagaagaaatagaaaagttcagagcagaattttataaaaacagattcgaaactaagcattcatctgatttgttaatgagataccagttctcaaaggaaaacccagttggtaccatcttgccaagagtccaagttaaggacatcggtgatattaccgaggacaatgtcgctactaccttgcgtagagctatttccttttactctactttgcaagctcacgatggtcattgggccgctgactgtggtggtccaatgttcttgttacctggtttagttatcgctttgtctgttacaggtgccttgaacgctgtcttgtctgaagaacacaaaagagagatctgccgttacttatataatcatcaaaactgtgacggtggttggggtttgcacattgaatcccactcaactatgttcggttctgtcttatcttacgttactttgagattgttaggtgaaaaggcaaatggtggtgaaggtgctatggagaagggtagaaaatggatattggatcatggtaccgccactgctattacttcctggggtaagatgtggttgtccgttttgggtttgtttgattggtctggcaacaacccattgcctccagaaatgtggttattgccatacattttgccattccatccaggtagaatgtggtgtcactgccgtatggtttatttacctatgtcttacttatatggtaaaagatttgtcggtccaatcacccctacagttttgtctttaagaaaggaattgttcactgtcccataccacaagatcaattggaacaaggctagaaacgaatgtgctaaggaagatttgtattacccacaccctttgttgcaagacatattatggacttccttggataaattgatcgaaccattgttcatgcattggccaggtaaaaaattgagagaaaaggccttatccaccgttatggaccacattcactacgaagatgaaaatacccgttatatttgtttgggtccagtcaataaggttttaaacatgttatgttgctgggtcgaagattcatcttctgaagcttttaagttacatttgccaagattgtacgactatttatggattgcagaggacggtatgaaaatccaaggttataacggttcccaatcatgggatacctccttcgctatacaggccattatttctactaatttggtcgaggaatacggcccaacattaagaaaggcacacaagtttatgaaaaactcccaagttttggacgattgtcctggtaacttggacttctggtaccgtcacatctcaaagggtgcttggccattctccactgctgatcatggttggccaatttctgactgtacagctgagggtttgaaagcctgtttattgttgtcaaagttgcctgttgaaatcgttggtgaaccattgaaggctaacagattgtacgatgcagttaatgtcatgttatctttgcaaaatccagatggtggtataggtacctacgaattgtctcgttcatatccatggttggaaattatcaatccagctgaaacctttggtgacatcgttatcgattacccatatgttgaatgtacctctgccattatccaggctttagctgctttcaagaaattataccctggttatagaaaggaggatgtcgaaagatgtattgaaaaaggtgctgccttcatagagaagattcaagaagctgacggttcttggtacggttgctggggtgtttgttttacttacggtacttggtttggtgttaagggtttgttggatgcaggtagaaactttaacaactcctacaacattagaaaggcctgtgatttcttattatccaagcaagtcgtctccggtggttggggtgaatcttatttatcttgtcagaacaaggtttataccaacttgaagggtaacaagtctcattccgtttgtacagcttgggctatgttggctttgattgaagcaggtcaaggtgagagagaccctactccattacatagagctgccaaagtcttgattaattctcaattagaaaatggtgatttcccacaacaagaaatctctggtgtcttcaacaaaaactgcatgatctcctactctgcatacagaaatattttcccaatctgggctttgggtcaataccaatctcaattgttgaatccacaataa

SEQ ID NO: 38 - DNA, 2307 bp, Artificial Sequence
  Synthetic
atgtggaaattgaaggttgcagccgagggtgggggtggtcctttattgagatctactaatcgttttgtcggtagaacagtttgggaatttgaaccagatttaggtaccccagaacaaagagctgaagtcgagaaggctagaagagacttctcagatcatagattccagcgtagacactccgctgacgttttgatgcgtatgcaaatgcaacaatactctaaaggtactccattgaagttagatttgccagctgtcaagaagttgggtgaagacgaagatgttactgaagaagccgtttccacctctttgaagagagctatcaacagagtctctgctttacaagcccacgacggtcattggccaggtgattgttccggtcctttgttcttgttgccaggtttaattataaccttgtatgttacaggtgccttgaacgcagtcttatcatctgaacaccaaagagaaattagaagatacttatacaatcaccaaaacgaagatggtggttggggtttgcatatggaaggtcactccgctatgttgggtactaccttgaattatgttgcattaagattaatcggtgagggtccagactctggtggggacgatggtgctgctatggaaagaggtcgtaactggattttgcagagaggtggtgccacttacacaacttcatggggtaaattctggttgaccgttttgggtgtctacgactggtccggtaacaatccattgcctcctgaaatgtggttgttgccatatcatttaccatttcatccaggtagaatgtggtgccactgtcgtgctgtttatttgccaatgtcttacgtttacggtaagagattcgtcggtcgtatcactccattggttttagagttgagaaacgaattgtacggtgatccatattcattgatagattggaataaagctagaaaccaatgtgctaaggaagatttgtattacccacactcctttttacaagacgttttgtgggctaccttgcataaattcgtcgaacctgttatgatgcattggccaggtattaagttcagagaaatcgccttaagaaccgctatgagacacatccactacgaagacgaatctacacgttacattaacttgggtcctgtcaacaaggttttgaacatgttagcttgttggattgaggatccaaattctgaagcttttaagttgcacgtcccaagaatttatgattacttgtggttagctgaagacggtatgaagatgaaaggttacaacggttctcagttgtgggacgctggtttgactgttttggccatcgttaataccgacttaatcgaggaatttggtccaactttaaagttggcccatgcattcgtcaaaaactcacaaataattgacaattgtttggaagatttgaaccaatggtatagacacatgtctaaaggtggttggcctttttccaccgctgaccacggttggtgcgtttccgattgtactgcaactggtttagaagccaccttgttattgtctactatatccccacaaatcgtcggtgaggctatggaagttggtagagtttacgatggggttaactgtttgatttcattgatgaacaataatggtggtttcgcaaccttcgaattgactagatcctatgcttggttagaacatattaacccttcagaaactttcggtggtatcatgatcgattacccatacgtcgaatgcacatcttcttctatacaagccttagcattattcaagaagttgtacccaagacacagaactgaagagatcgactcttgtatttccaagggtgctaactttattgagtcaatgcaaagaaatgatggttcttggtatggttcttggggtgtctgttttacttacgctacatggttcgctgttttcggtttggcttgtgccggtagaacatttgaagattccccagctataaaaaaggcttgcgaatttttattatctaaggaattgccatccggtggttggggtgaatcttacttgtcctgtcaagataaggtctacaccaatttggaggggatgagacctcatgccgtcaacacatcttgggctatgttggctttgattcgtgttggtcaagctgaaagagacccagcaccattgcacagagctgcaagagttttgattaacttgcaatccgaagacggtgaatttccacaacaggagatcatcggtgttttcaatcagaactgtatgattggttactctcaatatagaaacatcttcccaatttgggctttaggtgaataccgtactaaagtccatgtcccacgtaaaaagtaa

SEQ ID NO: 39 - DNA, 2274 bp, Artificial Sequence
  Synthetic
atgtggcgtttgaagtttgctgagggtggatcaccatggttaagaacaactaataaccatgttggtagacaagtctgggaatttgaccctagattgggtaccccagaagaattggcagaaatagaggaagctagaaaatccttcgccgaaaacagattcgttcacaagcactcttctgatttattgatgcgtttacagttctccagagagaatccagtcagacaagttttgccacaagtcgaagttaaggatactgacgatatctctaaagaagctgtcaagtctaccttggaaagagccttgtcattctattcagctgttcaaacttctgacggtaactgggcatctgacttaggtggtcctatgtttttgttaccaggtttggtcattgctttgtccatcaccggtgctttgaatgccgttttatccgaacaacataagcaagaaatgtgccgttacttgtacaaccaccagaacgaagatggtggttggggtttacatattgaaggtccttctactatgttcggttctgttttgaactatgttacaatgagattgttgggtgaaggtccaaacgatggtgacggtgctatggaaaagggtagagactggattttgaatcacggtggtgctacctacatcacctcctggggtaaaatgtggttaactgtcttaggtgtttttgagtggtctggaaacaatccattgcctccagaaatttggttgttgccatacatattaccaatccacccaggtagaatgtggtgtcattgtagaatggtctatttgccaatgtcttacttgtatggtaaacgtttcgtcggtcctattaccccaactgttttatccttgagaaaggaattattcaccgttccataccatgaggtcgattggaacaaggcaagaaatttgtgtgctaaggaagatttatactacccacacccagttgttcaagacattttgtgggcctctttgcataaggttgttgaaccaatattgatgcgttggccagtcactaaattgagagaaaaagcattaagaactgctatcgaacacatccattatgaagacgagaatacaagatatatctgcttgggtcctgttaacaaggtcttaaatttgttgtgttgttgggtcgaagatccttactcagatgcttttaagttgcacttgcaacgtgtccacgattacttgtgggtcgctgaagacggtatgaaaatgcaaggttataacggttctcaattatgggataccgccttttccattcaagctattttcgctactaactttgttgaagagtacggtgacgtcttgaagaaggctaactcctacataaaagattcccaaattcaagaggactgtccaggtgacccaaacgtttggttcagacacatccacaagggtgcctggcctttctctaccagagatcatggttggttaatctcagattgtactgctgaaggtttgaaagcctcattgatgttgtccaagttgccatctaccatggttggtgaaccattggaagctaatagattgtgcgacgcagtcaacgttttgttatcattgcagaatgataacggtggtttcgcttcctacgaattgacaagatcttacccatggttagaattaattaacccagccgaaactttcggtgacatcgttattgactatccatatgtcgaatgtacttctgcaaccatggaggctttaaccttatttaagaagttgcacccaggacatagaacaaaggaaatagatcaatgtatcaagaaggctgctaagttcttggaaaaaatgcaaagagcagatggttcctggtacggttgttggggtgtctgtttcacttacgctggttggtttggtataaaaggtttagttgctgccggtagaacttacaactcttgtttggcaattagaaaggcttgtgaatttttgttatctaaggaattgccaggtggtggttggggtgagtcatatttatcctgccaaaataaggtttacactaacttggaaggtaataagcctcatttggtcaacactgcctgggtcttgatggccttgattgaagctggtcaacacgaacgtgacccaaagcctttgcatcgtgctgctagatatttgatcaattcccaattagaaaatggtgatttcccacagcaagaaattatgggtgttttcaacaaaaactgtatgatcacatacgccgcttacagaaacatttttcctatttgggctttaggtgaatacagatctcaagttttgcaagctgcataa

SEQ ID NO: 40 - DNA, 1992 bp, Artificial Sequence
  Synthetic
atggaccgtcagtcatttagagataatagattccatagaaagcaatcttccgatttgttcttagccatacaatttgcagaagagaaacaatctgtcactaacttgccacaaacaaagttagaagaatttgaagacgttaagaaagaggctgttaagtccaccttggaaagagctttgtctttctactccgctgtccaaacttctgacggtaactgggcctctgatttgggaggtcctatgttcttattgccaggtttggttattaccttatatgtcaccggtgctttgaatactgttttgtcaaaagaacaccagtacgaaatctgtcgttatttgtacaaccaccaaaacagagacggtggttggggtttacatatcgaaggtccatcaactatgtttggtacagttttgaattacgtttctttaagattgttaggtgaaggtgctgaaggtggtgagggtgctattgaaaaggctagacgtatgtggtgccactgtagaatggtctacttgccaatgtccttcttgtatggtaagaaattcgttggtccaattactcctaccatcttatccttgagaaaggaattatacaccgtcccataccatgaagttgattggaacaaggccagaaatgcatgtgccaaggaagatttgtattaccctcacccattggttcaagacattttgtgggcttctttgcactacttgtatgaaccaatgttgaagtactggccttgtaaatctttgagagagaaggccttacaaatcgttatgcaacatatccactatgaagacgaaaacactcgttatatttgcttaggtccagtcaataaagtcttaaacatgttgtgttgttgggtcgaggatccatactccgaatcttttaagttgcacttgccacgtatattggactacttgtggattgctgaagatggtatgaagatgcaaggttacaacggttctcaattatgggatacagctttcgctatacaagcaattatctccaccggtttagctgacgagtacggttccgttttgagaaaggctcatgacttcttaaaagattcacaaatccaagaagactgtccaggagatccaaacgtctggtttagacacattcataaaggtgcttggccattttctactagagatcatggttggttgatttccgattgcactgccgaaggtttaaaggcttctttgatgttgtctaagttgccatcaactatggtcggtgaacctttggaagttaatagattatgtgatgctgttaacgttttattgtctttgcagaacgacaatggtggtttcgcctcctatgaattaaccagatcatacccatggttggaattgattaacccagctgagaccttcggtgatatcgttatcgactacccatatgttgaatgtacctctgctactatggaagccttaacattgtttaagaaattacacccaggtcatagaacaaaggaaattgatataggtagagctgtcgaatttttggagaagatgcaaagagcagacggttcctggtatggttgttggggtgtttgcttcacttacgcaggttggttcggtatcaagggattggtcgctgctggtagaacctataattcctgtttggctattagaaaggcttgcgaatttttgttatctaaagaattacctggtggtggttggggtgaatcctacttgtcctgtcagaacaaggtttacacaaatttggaaggtaacaagccacacttggttaatactgcatgggtcttgatggcattaattgaggccggtcaagctgaacgtgatcctaccccattacacagagctgctaaaatcttaattaattctcaaatggaagacggtgatttcccacaagaagagatcatgggtgtttttaacaagaactgtatgatctcttactccgcttacagaaacattttcccaatatgggccttgggtgaatatcattgtcgtgtcttgcaggcaccataa

SEQ ID NO: 41 - protein, 756 aa, Spinacia oleracea
MWRLKIAEGGSPWLRTTNNHVGRQIWEFDPNLGTPEQIREVEEARENFWKNRFEQKHSSDLLMRMQFAQENSSNVVLPQVKVKDEDEITKEAVKSTLERALSFYSAVQTSDGNWASDLGGPMFLLPGLVIALSVTGALNAVLSKEHQKEMCRYLYNHQNKDGGWGLHIEGHSTMFGTVLTYVTLRLLGEGVDDGDGAMERGRKWTLEHGSATAITSWGKMWLSVLGVFEWAGNNPMPPETWLLPYILPVHPGRMWCHCRMVYLPMSYLYGKRFVGPITPTVLSLRRELFDVPYHEIDWDRARNECAKEDLYYPHPLVQDILWASLHKAVEPILMRWPGKKLREKALSTVMEHIHYEDENTRYICLGPVNKVLNLLCCWVEDPYSDAFKLHLQRVHDYLWVAEDGMKMQGYNGSQLWDTAFSIQAILATNLGEEYGGTLRKAHNFIKDSQIQEDCPGDPNVWFRHIHKGAWPFSTRDHGWLISDCTAEGLKASLMLSKLPSTMVGEPLEVNRLCDAVNVLLSLQNDNGGFASYELTRSYPWLELINPAETFGDIVIDYPYVECTSATMEALTLFKKLHPGHRTKEIDNCIKKAAKFLEKMQRADGSWYGCWGVCFTYAGWFGIKGLVAAGRTYNSCLAIRKACEFLLSKELPGGGWGESYLSCQNKVYTNLEGNKPHLVNTAWVLMALIEAGQAKRDPMPLHRAAKVLINSQMPNGDFPQQEIMGVFNRNCMITYAAYRNIFPTWALGEYRTQVLQK

SEQ ID NO: 42 - protein, 761 aa, Aquilaria agallocha
MWRLKTGSETVGDNGRWLRSTNNHVGRQVWEFFPEMGSPEELVAIEAAHREFHLNRFHKQHSSDLLMRLQYEREKPCVQKEGAVRLDATETPTEAAVETTLRRALTFYSTMQSDDGNWASDLGGPMFLLPGLVIALYVTGVLNSVLSKEHQREIRRYLYNHQNQDGGWGLHIEGPSTMFGSALNYVTLRLLGEGPDDGEGAMERARQWILSRGGAVAVTSWGKLWLSVLGVYEWDGNNPLPPELWLLPYSLPLHPGRMWCHCRMVYLPMSYLYGKRFVGPITPTVLSLREELYPIPYHHVDWNKARNTCAQDDLYYPHPFVQDLLWGSLYHVYEPLVMRWPGKRLRERALQHVMKHIHYEDENSRYICLGPVNKALNMLCCWVEDPHSEAFKMHIPRIYDYLWIAEDGMRMQGYNGSQLWDTAFSVQAIVATKLTDEFSETLAKANKYILDAQILKNCPGDPNVWFRHIHKGAWPFSTRDHGWLISDCTAEGLKASLMLSKLPSKIVGEPLEKNRLYDAVNVLLSLQNENGGFASYELTRSYPWLELINPAETFGDIVIDYTYVECTSATMEALTLFKKLHPGHRKKEIERCMANAAKFLEMRQEADGSWYGCWGVCYTYAGWFGIKGLVAAGRTYNNCANIRRACDFLLSKQLPNGGWGESYLSCQNKLYTNLNNDRMHTVNTAWAMMALIEAGQAKTDPMPLHHAARTLINAQMETGDFPQQEIMGVFNKNCMITYAAYRNVFPVWALGEYHHRVLNGC

SEQ ID NO: 43 - protein, 761 aa, Aquilaria agallocha
MWRLKTGSETVGDNGRWLRSTNNHVGRQVWEFFPEMGSPEELVAIEAAHREFHLNRFHKQHSSDLLMRLQYEREKPCVQKEGAVRLDATETPTEAAVETTLRRALTFYSTMQSDDGHWANDLGGPMFLLPGLVITLTITGTINVVLSKEHQREIRRYLYNHQNQDGGWGLHIEGPSTMFGSALNYVTLRLLGEGPDDGEGAMERARQWILSRGGAVAVTSWGKLWLSVLGVYEWDGNNPLPPELWLLPYSLPLHPGRMWCHCRMVYLPMSYLYGKRFVGPITPTVLSLREELYPIPYHHVDWNKARNTCAQDDLYYPHPFVQDLLWGSLYHVYEPLVMRWPGKRLRERALQHVMKHIHYEDENTEYICLGPVNKALNMLCCWVEDPHSEAFKMHIPRIYDYLWIAEDGMKMQGYNGSQLWDTAFAVQAIVATKLTDEFSETLAKANKYILDAQILKNCPGDPNVWYRHITKGAWSFSTADQGWLVSDCTAEGLKALLLYSMLPHQKAPSSIEKNRLYDAVNVLLSMQNADGGFASFELTRSYPWLEMINPAETFGDIVIDYTYVECTSAVIQALALFKRLHPGHRKKEIERCMANAAKFLEMRQEADGSWYGCWGVCYTYAGWFGIKGLTSCGRTYNNCANIRRACDFLLSKQLPNGGWGESYLSCQNKLYTNLNNDRMHTVNTAWAMMALIEAGQAKTDPMPLHHAARTLINAQMETGDFPQQEIMGVFNKNCMISYAGYRNVFPVWALGEYHHRVLNGC

SEQ ID NO: 44 - protein, 741 aa, Aquilaria agallocha
MWRLKIAEGKEGPYLKSTNNFVGRQTWEFDPDAGTPEERAAVEEARRAFYSNRYRVKPPADLLWRLQFMREKNFKQIIPMVRIKDGEAITHEKATATLRRAVHFLTVLQSIDGHWPAENAGCHYFLPPLVFCLYITGHLSSVFSQEHQREILRYIYNHQNEDGGWGLHIEGHSIMFSTALSYICLRILGEGLEGGQDNACAKAQKWILDHGSVTHIPSWGKTWLSVLGLFDWSGSNPIPPEFWMLPSFLPIHPGKIWSYCRTTYMPMSYLYGKKFVAPITPLIIQLRKELYLQPYDEINWRKVRHLCAKEDLYYPHPVIQDLMWDCLYVFTEPLLNRWPLNKMIREKALKVTMNHIHYEDENSSYINMACVGKVLCTLACWVEDPNGDYFKKHLARIPDYIWVAEDGMTMQGLASQTWDSGLAIQALFASNLIDEIGPTLKRAHDFIKKSQVLDNPFGDFKKMFRHSSKGSWTFSVRDHGWPVSDCTAEGLKCCLLLSMLPQEIVGEKLEVERLHDAVNIIFHLQSKNGGVAAWEPVRASKWLELLNPIEFLEDIVVDHEYLECTASSIDALQLFKKLYPTCEREEIENFILKAVEYIENIQMSDGSWYGNWGVCFIYGTLFALKGLAKAGKTYDDCVAMRKGVDFLLRIQRDDGGWGESYKSCPNKKFEPLQREGSNVVQTAWAILGLIESRQIMRDPTPLHRAIKFIINSQLEDGDFPQQVRGLSYIYSSLSFLPVIKM

SEQ ID NO: 45 - protein, 766 aa, Benicasa hispida
MWRLKIGADTVLTDPSNAGGRWLSTLSNHLGRQVWEFCAELGSPEDLQQIQHARQRFSDHRFEKKHSTDLLMRMQFAKENSSFVNLPQIKVKDKEDVTEEAVTRTLKRAINFYSTIQAHDGNWASDLGGPMFLLPGLVIALYVTGVLNSVLSTEHQREICRYLYNHQNRDGGWGLHIEGPSTMFGSVLNYVTLRLLGEEAEDGQGGVDKARKWILDHGGATAITSWGKMWLSVLGVYEWAGNNPLPPELWLLPYLLPCHPGRMWCHCRMVYLPMCYLYGKRFVGPITPIIRSLRKELYLVPYHEVDWNVARNQCAKEDLYYPHPLVQDVLWASLHHVYEPLFMCWPAKRLREKALRTVMQHIHYEDENSRYICLGPVNKVLNMLCCWVEDPHSEAFKLHIPRLYDYLWIAEDGMRMQGYNGSQLWDTAFSVQAIMSTKLSEEYGTTLRKAHKYIQDSQVQEDCPGDPNVWFRHIHKGAWPFSTRDHGWLISDCTAEGLKASLMLSKLPSKIVGEPLEKERLYDAVNVLLSLQNENGGFASYELTRSYPWLELINPAETFGDIVIDYPYVECTSAAIQALAAFKKLYPGHRSNEIGNSIAKAADFIESIQATDGSWYGSWGVCFTYAGWFGIKGLVAAGRTYNSCSSLRKACDFLMSKELAAGGWGESYLSCQDKVYTNIKDDRPHLVNTGWAMLSLIDAGQAERDPTPLHRAARILINSQMEDGDFPQEEIMGVFNKNCMITYAAYRNIFPIWALGEYRCRVLQAS

SEQ ID NO: 46 - protein, 764 aa, Citrullus colocynthis
MWRLKVGAESVGEKEEKWLKSISNHLGRQVWEFCAHQPTASPNHLQQIDNARNHFRNNRFHRKQSSDLFLAIQNEKEIANVTKGGGIKVKEEEDVRKETVKNTVERALSFYSAIQTNDGNWASDLGGPMFLLPGLVIALYVTGVLNSVLSKHHRQEMCRYLYNHQNEDGGWGLHIEGTSTMFGSALNYVALRLLGEDADGGEGGAMTKARSWILDRGGATAITSWGKLWLSVLGVYEWSGNNPLPPEFWLLPYCLPFHPGRMWCHCRMVYLPMSYLYGKRFVGPITPIVLSLRKELYTIPYHEIDWNRSRNTCAKEDLYYPHPKMQDILWGSIYHLYEPLFTRWPGKRLREKALQMAMKHIHYEDENSRYICLGPVNKVLNMLCCWVEDPYSDAFKFHLQRVPDYLWVAEDGMRMQGYNGSQLWDTAFSVQAIISTKLIDSFGTTLKKAHDFVKDSQIQQDCPGDPNVWFRHIHKGAWPFSTRDHGWLISDCTAEGLKASLMLSKLPSKIVGEPLEKSRLCDAVNVLLSLQNENGGFASYELTRSYPWLELINPAETFGDIVIDYPYVECTSATMEALTLFKKLHPGHRTKEIDIAVARAANFLENMQRTDGSWYGCWGVCFTYAGWFGIKGLVAAGRTYNSCVAIRKACDFLLSKELPGGGWGESYLSCQNKVYTNLEGNRPHLVNTAWVLMALIEAGQAERDPAPLHRAARLLINSQLENGDFPQEEIMGVFNKNCMITYAAYRNIFPIWALGEYFHRVLTE

SEQ ID NO: 47 - protein, 764 aa, Citrullus colocynthis
MWRLKVGAESVGEKEEKWLKSISNHLGRQVWEFCADQPTASPNHLQQIDNARKHFRNNRFHRKQSSDLFLAIQNEKEIANGTKGGGIKVKEEEDVRKETVKNTVERALSFYSAIQTNDGNWASDLGGPMFLLPGLVIALYVTGVLNSVLSKHHRQEMCRYLYNHQNEDGGWGLHIEGTSTMFGSALNYVALRLLGEDADGGEGGAMTKARGWILDRGGATAITSWGKLWLSVLGVYEWSGNNPLPPEFWLLPYCLPFHPGRMWCHCRMVYLPMSYLYGKRFVGPITPIVLSLRKELYTIPYHEIDWNKSRNTCAKEDLYYPHPKMQDILWGSIYHLYEPLFTRWPGKRLREKALQMAMKHIHYEDENSRYICLGPVNKVLNMLCCWVEDPYSDAFKFHLQRVPDYLWIAEDGMRMQGYNGSQLWDTAFSVQAIISTKLIDSFGTTLKKAHDFVKDSQIQQDFPGDPNVWFRHIHKGAWPFSTRDHGWLISDCTAEGLKASLMLSKLPSKIVGEPLEKSRLCDAVNVLLSLQNENGGFASYELTRSYPWLELINPAETFGDIVIDYPYVECTSATMEALTLFKKLHPGHRTKEIDTAVAKAANFLENMQRTDGSWYGCWGVCFTYAGWFGIKGLVAAGRTYSTCVAIRKACDFLLSKELPGGGWGESYLSCQNKVYTNLEGNRPHLVNTAWVLMALIEAGQAERDPAPLHRAARLLINSQLENGDFPQEEIMGVFNKNCMITYAAYRNIFPIWALGEYFHRVLTE

SEQ ID NO: 48 - protein, 764 aa, Cucurbita maxima cv. Rimu
MWRLKVGAESVGEKDEKWVKSVSNHLGRQVWEFCADAAADTPHQLLQIQNARNHFHHNRFHRKQSSDLFLAIQYEKEIAKGAKGGAVKVKEGEEVGKEAVKSTLERALGFYSAVQTSDGNWASDLGGPMFLLPGLVIALHVTGVLNSVLSKHHRVEMCRYLYNHQNEDGGWGLHIEGTSTMFGSALNYVALRLLGEDADGGDGGAMTKARAWILERGGATAITSWGKLWLSVLGVYEWSGNNPLPPEFWLLPYSLPFHPGRMWCHCRMVYLPMSYLYGKRFVGPITPKVLSLRQELYTIPYHEIDWNKSRNTCAKEDLYYPHPKMQDILWGSIYHVYEPLFTRWPGKRLREKALQAAMKHIHYEDENSRYICLGPVNKVLNMLCCWVEDPYSDAFKLHLQRVHDYLWVAEDGMRMQGYNGSQLWDTAFSIQAIVATKLVDSYAPTLRKAHDFVKDSQIQEDCPGDPNVWFRHIHKGAWPFSTRDHGWLISDCTAEGLKASLMLSKLPSTMVGEPLEKNRLCDAVNVLLSLQNDNGGFASYELTRSYPWLELINPAETFGDIVIDYPYVECTAATMEALTLFKKLHPGHRTKEIDTAIGKAANFLEKMQRADGSWYGCWGVCFTYAGWFGIKGLVAAGRTYNSCLAIRKACEFLLSKELPGGGWGESYLSCQNKVYTNLEGNKPHLVNTAWVLMALIEAGQGERDPAPLHRAARLLMNSQLENGDFVQQEIMGVFNKNCMITYAAYRNIFPIWALGEYCHRVLTE

SEQ ID NO: 49 - protein, 774 aa, Cucumis melo
MWRLKVGKESVGEKEEKWIKSISNHLGRQVWEFCSGENENDDDEAIAVANNSASKFENARNHFRNNRFHRKQSSDLFLAIQCEKEIIRNGAKNEGTTKVKEGEDVKKEAVKNTLERALSFYSAVQTSDGNWASDLGGPMFLLPGLVIALYVTGVLNSVLSKHHRQEMCRYIYNHQNEDGGWGLHIEGSSTMFGSALNYVALRLLGEAADGGEHGAMTKARSWILERGGATAITSWGKLWLSVLGVYEWSGNNPLPPEFWLLPYSLPFHPGRMWCHCRMVYLPMSYLYGKRFVGPITPIVLSLRKELYTIPYHEIDWNRSRNTCAKEDLYYPHPKMQDILWGSIYHVYEPLFSGWPGKRLREKAMKIAMEHIHYEDENSRYICLGPVNKVLNMLCCWVEDPYSDAFKFHLQRIPDYLWLAEDGMRMQGYNGSQLWDTAFSIQAIISTKLIDTFGPTLRKAHHFVKHSQIQEDCPGDPNVWFRHIHKGAWPFSTRDHGWLISDCTAEGLKASLMLSKLPSKIVGEPLEKNRLCDAVNVLLSLQNENGGFASYELTRSYPWLELINPAETFGDIVIDYSYVECTSATMEALALFKKLHPGHRTKEIDAAIAKAANFLENMQKTDGSWYGCWGVCFTYAGWFGIKGLVAAGRTYNNCVAIRKACNFLLSKELPGGGWGESYLSCQNKVYTNLEGNKPHLVNTAWVMMALIEAGQGERDPAPLHRAARLLINSQLESGDFPQQEIMGVFNKNCMITYAAYRNIFPIWALGEYSHRVLDM

SEQ ID NO: 50 - protein, 723 aa, Coccinia grandis
MWRLKLGKGENEDYLFSTNDFIGRQTWEFDPNAGTPQERAQVEAARLNFYQNRNHVQCSSDLLWRFQFLEEKNFKQAIPKVVVEERNGNDRELSIKKETVKTALRRATNFFAALQSNHGHWPAENAGPLYYLPPLVFALYITRDLNTILSKEHQKEILRYVYCHQNEDGGWGLHIASRQSCMLCTVLNYIELRLLGEEADNEACSRARKWILDHGGALYIPSWGKIWLSILGLYEWEGTNPMPPEIWMFGKILPWNLGGLLCYTRLTLLPMSYLYGKRFVGPLTPLILQLRHEIYTQPYNDIKWSPARHLCAKEDEYFERSIFQKLVWDVVTYVGEPILKSWAFKKIRNRAIQIAKWYMDYEDQNSHYITIGCVEKPLFTLTSWVVDPHGEAYKKHLARIKDYLWVGEDGMKMQSFGSQSWDVAFAIQAILATNLHHEFSETLKKGHDFIKQSQVKKNPSGDFPRMYRHISKGSWTFSDQDHGWGVSDCAAENLLCCLKLSTMPSHIVGDSMEPQCFFEAVNFILSLQAKDGGLSAWEPAGTLPLWFEVLNPVEFFEYTVLEIECVECTSSAIQALVLFKKLFPSHRKKEIDNFIEKATNYIKEIQKEDGSWYGNWGICHIYGTYFAIKGLAAAGNTYENCSTVTKAVDFLLKIQCPDGGWGESHISCLNKVHTPLPGNASNLVQTSFALMSLIHSQQVCFFLFFFFPSFLPICTLPSLIIIF

SEQ ID NO: 51 - protein, 765 aa, Coccinia grandis
MWRLKVGADTVPADPSKSGGWLSTLSNHLGRQVWEFCAELGSPEDLQQIQHARQHFSDHRFEKKHSADLLMRMQFAKENSSFVNLPQIKVKDKEDVMEEAVTRTLKRAINFYSTIQADDGNWASDLGGPMFLLPGLVIALYVTGVLNSVLSTEHQREICRYLYNHQNRDGGWGLHIEGPSTMFGSVLNYVTLRLLGEEAEDGEGGVDKARKWILDHGGATAITSWGKMWLSVLGVYEWTGNNPLPPELWLLPYLLPVHPGRMWCHCRMVYLPMCYLYGKRFVGPITPIIRSLRKELYLVPYHEVDWNEARNLCAKEDLYYPHPLVQDILWASLHHVYEPLFMRWPAKRLREKALRTVMQHIHYEDENSRYICLGPVNKVLNMLCCWVEDPHSEAFKLHIPRVYDYLWIAEDGMRMQGYNGSQLWDTAFSVQAIISTKLAEEYGTTLRKAHEYIKDSQVLEDCPGDPNVWFRHIHKGAWPFSTRDHGWLISDCTAEGLKASLMLSKLPSKIVGEPLEKERIYDSVNVLLSLQNENGGFASYELTRSYPWLELINPAETFGDIVIDYPYVECTSAAIQALAAFKKLYPGHRSNEIGNCIAKAADFIESIQATDGSWYGSWGVCFTYAGWFGIKGLVAAGRTYNNCLSLRKACDFLLSKELAGGGWGESYLSCQDKVYTNIKDDRPHIVNTGWAMLSLIEVGQAERDPTPLHRAARILINSQMDDGDFPQEEIMGVFNKNCMITYAAYRNIFPIWALGEYRCRVLQAP

SEQ ID NO: 52 - protein, 785 aa, Cucumis sativus
MWRLKVGKESVGEKEEKWIKSISNHLGRQVWEFCAENDDDDDDEAVIHVVANSSKHLLQQQRRQSSFENARKQFRNNRFHRKQSSDLFLTIQYEKEIARNGAKNGGNTKVKEGEDVKKEAVNNTLERALSFYSAIQTGDGNWASDLGGPMFLLPGLVIALYVTGVLNSVLSKHHRQEMCRYIYNHQNEDGGWGLHIEGSSTMFGSALNYVALRLLGEDANGGECGAMTKARSWILERGGATAITSWGKLWLSVLGVYEWSGNNPLPPEFWLLPYSLPFHPGRMWCHCRMVYLPMSYLYGKRFVGPITPMVLSLRKELYTIPYHEVDWNRSRNTCAQEDLYYPHPKMQDILWGSIYHVYEPLFNGWPGRRLREKAMKIAMEHIHYEDENSRYICLGPVNKVLNMLCCWVEDPYSDAFKFHLQRIPDYLWLAEDGMRMQGYNGSQLWDTAFSIQAILSTKLIDTFGSTLRKAHHFVKHSQIQEDCPGDPNVWFRHIHKGAWPFSTRDHGWLISDCTAEGLKASLMLSKLPSKIVGEPLEKNRLCDAVNVLLSLQNENGGFASYELTRSYPWLELINPAETFGDIVIDYSYVECTSATMEALALFKKLHPGHRTKEIDAALAKAANFLENMQRTDGSWYGCWGVCFTYAGWFGIKGLVAAGRTYNNCVAIRKACHFLLSKELPGGGWGESYLSCQNKVYTNLEGNRPHLVNTAWVLMALIEAGQGERDPAPLHRAARLLINSQLENGDFPQQEIMGVFNKNCMITYAAYRNIFPIWALGEYSHRVLTE

SEQ ID NO: 53 - protein, 764 aa, Cucurbita foetidissima
MWRLKVGAESVGEKDEKWVKSVSNHLGRQVWEFCADADAVTPHQSLQIHNARNHFHQNRFRRKQSSDLFLAIQYEKEIAKGVKVGAVKVKEGEEVGKEAVKSTLERALSFYSAVQTSDGNWASDLGGPMFLLPGLVIALYVTGVLNSVLSKHHRLEMCRYLYNHQNEDGGWGLHIEGTSTMFGSALNYVALRLLGEDADGGDGGAMTKARAWILERGGATAITSWGKLWLSVLGVYEWSGNNPLPPEFWLLPYSLPFHPGRMWCHCRMVYLPMSYLYGKRFVGPITPKVLSLRQELYTVPYHEIDWNKSRNTCAKEDLYYPHPKMQDILWGSIYHVYEPLFTRWPGKRLREKALQTAMKHIHYEDENSRYICLGPVNKVLNMLCCWVEDPYSDAFKLHLQRVHDYLWVAEDGMRMQGYNGSQLWDTAFSIQAIVATKLVDSYGPTLRKAHDFVKDSQIQEDCPGDPNVWFRHIHKGAWPFSTRDHGWLISDCTAEGLKASLMLSKLPSTMVGEPLEKSRLCDAVNVLLSLQNDNGGFASYELTRSYPWLELINPAETFGDIVIDYPYVECTAATMEALTLFKKLHPGHRTKEIDTAIAKAANFLEKMQRTDGSWYGCWGVCFTYAGWFGIKGLVAAGRTYNSCVAIRKACEFLLSKELPGGGWGESYLSCQNKVYTNLEGNKPHLVNTAWVLMALIEAGQGERDPAPLHRAARLLMNSQLENGDFLQQEIMGVFNKNCMITYAAYRNIFPIWALGEYCHRVLTE

SEQ ID NO: 54 - protein, 765 aa, Cucumis melo
MWQLKVGADTVPSDPSNAGRWLSTLNNHVGRQVWHFHPELGSPEDLQQIQNARQHFYDHRFEKKHSSDILMRMQFAKENSSFVNLPQIKVKEKEDVVEEAVTQTLRRAMNFYSTIQADDGHWPGDYGGPMFLLPGLVITLSITGALNAVLSTEHQREICRYLYNHQNRDGGWGLHIEGPSTMFGSVLSYVTLRLLGEEAEDGQGGVENARKWILDHGGATAITSWGKMWLSVLGVYEWAGNNPLPPELWLLPYLLPFHPGRMWCHCRMVYLPMCYLYGKRFVGPITPIIRSLRKELYLVPYHEIDWNEARNQCAKEDLYYPHPLVQDVLWASLHHVYEPLFMRWPAKRLREKALRTVMQHIHYEDENTRYICIGPVNKVLNMLCCWVEDPHSEAFKLHIPRIYDYLWLAEDGMKMQGYNGSQLWDTAFAVQAIMSTKLVEEYGTTLRKAHKYIKDSQVLEDCPGDLQSWYRHISKGAWPFSTADHGWPISDCTAEGLKAVVLLSKLPSEIVGKPVDEERMYDAVNVILSLQNTDGGFATYELTRSYRWLELMNPAETFGDIVIDYPYVECTSAAIQALAAFRKLYPGHRSNEIGNCIAKAADFIESIQATDGSWYGSWGVCFTYGGWFGIKGLVAAGRRYENSSSLRKACDYLLSKELPAGGWGESYLSCQDKVYTNIKDDRPHLVNTAWAMLSLIDAGQAERDPTPLHRAARILINSQMEDGDFPQEDIMGVFNKNCMISYSAYRNIFPIWALGAYRCRVLLAS

SEQ ID NO: 55 - protein, 765 aa, Cucumis metuliferus
MGEMWKLKFSKGWETSENDHVGRQYWEFDTNLTPSEEEKAQIQKFYNEFYNYRFQAKHSSDLLMRFQLRKENNGGEVKLPTQIKITGEEEINEEAIEKTLRRGIRFYSTLQTQDGFWPGDYGGPLFLLPALVIGLSVTKALDTAISVHHRHEMCRYLYNHQNEDGGWGLHIEGNSTMLCTALSYVSLRLLGEKMDGRDGVLLKARRWILDRGGATSIPSWGKTWLSVLGVYEWEGNNPLPPEIWLLPYSLPLHPGRMWCHSRMVYLPMSYLYGKRFVGPISPIIISLRRELYTCSYHTIDWNLSRNLCAKEDLYTPHSKIQNILWNSIHKFGEPLLKKWPLSKVRQKALDFVIQHIHYEDENTHYLCLGPISKVLNMVCCWAEDPNSEAFRRHIPRIKDYLWLAEDGMKMQGYNGSQLWDVVFAVQAILATDLVDEYGSVLKKAHNFIKNSQMKRNGIKDQNNPSVWYRHMSKGGWPFSTPDNAWPVSDCTAEALKAAILLSQMPTTMVGEPIDVHNLYDAVNLILSLQNSNGGFASYELTRSYPWLEMLNPAEIFGDVMIDYQYVECTSAAIQGLKAFMKLHPGYRKKDIQTCISKAAHFIETIQLPDGSWYGSWGICYTYGTWFGIKGLVACGRTYANSKCIRKATQFLLSKQLKSGGWGESYLSAHHKVYADLKDGKSHIVNTSWALLALIQADQAQRDPSPLHRAATVLINSQMDDGDFPQQEIMGVFNKSCMISYAAYRNIFPIWALGEYRIRVLQLPEN

SEQ ID NO: 56 - protein, 766 aa, Cucurbita pepo
MWRLKIGADTVPSDPSNAGGWLSTLSNHLGRQVWEFCAELGSPEDLQQIQQARQRFSDHRFEKKHSADLLMRMQFAKENSSFVNLPQVKVKDKEEVSEEAVTRTLRRAINFYSTIQADDGNWASDLGGPMFLLPGLVIALYVTGVLNSVLSTEHQREICRYLYNHQNRDGGWGLHIEGPSTMFGSVLNYVTLRLLGEEAEDGQGAVDKARKWILDHGGAAAITSWGKMWLSVLGVYEWAGNNPLPPELWLLPYLLPCHPGRMWCHCRMVYLPMCYLYGKRFVGPITPIIRSLRKELYLVPYHEVDWNKARNQCAKEDLYYPHPLVQDILWASLHHVYEPLFMHWPAKRLREKALQSVMQHIHYEDENSRYICLGPVNKVLNMLCCWAEDPHSEAFKLHIPRIYDYLWIAEDGMRMQGYNGSQLWDTAFSVQAIISTELAEEYETTLRKAHKYIKDSQVLEDCPGDPNVWFRHIHKGAWPFSTRDHGWLISDCTAEGLKASLMLSKLPSKIVGEPLEKQQLYNAVNVLLSLQNENGGFASYELTRSYPWLELINPAETFGDIVIDYPYVECSSAAIQALAAFKKLYPGHRRDEINNCIAKAADFIESIQATDGSWYGSWGVCFTYAGWFGIKGLVAAGRTYNNCSSLRKACDFLLSKELAAGGWGESYLSCQNKVYTNIKDDRPHIVNTGWAMLSLIDAGQSERDPTPLHRAARVLINSQMEDGDFPQEEIMGVFNKNCMITYAAYRNIFPIWALGEYRSRVLKLLK

SEQ ID NO: 57 - protein, 762 aa, Cucurbita pepo
MWRLKIADGGNDPYIYSTNDFIGRQTWEFDPEAGTPEERQEVEEARHHFYRNRYKVKPSADCLWRMQFLREKKFKQEIGAVKIKEGEEISQDKARIALRRAVHFYSALQASDGHWPAENAGPLFFLPPLVMCLYITGHLDQVFPEEHKKEILRYIYCHQNEDGGWGLHIEGHSTMFCTALSYICMRILGEGPDGGLNNACARGRKWILDHGSVTYIPSWGKTWLSILGVYDWAGSNPMPPEFWLLPSFLPMHPAKMWCYCRMVYMPMSYLYGKRFVCQITPLIQELRLELHAQPFDEINWKKTRHLCTKEDVYYPHPLMQDLLWDSLYICTEPLLTRWPFNKLVREKALQVTMKHIHYEDDNSRYITIGCVEKVLCMLACWVEDPDGDYFKKHLARIPDYIWVAEDGMKMQSFGSQEWDTGFAIQALLAADMADEIGPVLARGHDFIKKSQVKDNPSGNFKTMHRHISKGSWTFSDQDHGWQVSDCTAEALKCCLLFSLMRPEIVGDKMEAQRLYDSVNVLLSLQSKNGGLAAWEPATGQKWLEMLNPTEFFADIVIEHEYVECTASAIQALILFKKLHPGHRTKEIDNFIQNAVRYLQDIQMPDGSWYGNWGVCFTYGCWFALGGLVAAAKTFNNCAAIRKGVHFLLNIQMPDGGWGESYHCCPSKKYVPLEGKRSNLVHTAWAMMALIHSGQAERDPTPLHRAAKLLINSQTEDGDFPQQEITGVFMKNCMLHYAAYRNIYPLWALAEYSKRVKLASTSP

SEQ ID NO: 58 - protein, 762 aa, Cucurbita pepo
MWRLKVADGGNDPYIYSMNNFVGRQIWEFDPDAGSPDERAEVERVRNEFTKNRLKGFPSADLLWRLQLLREKNFKQSIPPVKVEDGEEITYEMASDAMKRGAYFLEAIQASDGHWPSETSGPLFYLCPLLICMYIMGFMDSAFSPEHKKEMMRYLYNHQNEDGGWGLHVGGHSNMFCTTFNYISLRLLGEEPDVEAVAKGRIWIRDHGGVTSILSWGKTWLSILNLFDWSASNPMPPEYWMFPTWVPIHPSNMMCYTRITYMPMSYLYGKRFQAPLTPLVLQLRDELHTQAYEKINWRKVRHMCATEDLYFPHPFVQDLLWDTLYMLSEPLMTRWPFNKLIRQKALDETMRHIHYEDENSRYITIGCVEKPLCMLACWVEDPNSEYVKKHFARIPDYLWMAEDGMKMQSFGSQSWDAALAMQALLACNITHDIGSALNNGHEFIKNSQVRNNPPGDYKSMFRYMSKGSWTFSDCDHGWQVSDCTAENLKCCLLLSLLPPEIVGEKMEPQRFYDAVNVILNMQSKNGGLPAWEPASSYYWMEWLNPVEFLEDLIIEHQHVECTSSALQAILLFRKQYPEHRKKEINNFINKAVQFLQDIQLPDGSWYGNWGICYTYGTWFALKALSMAGKTYENCEALRKGANFLIKIQNPEGGFGESYLSCPYKRYIPLDGKRSNLVQTAWGMMGLIAAGQADVDPGPIHRAAKLLINSQTEDGDFPQEEITGEFFKNCTLHFAAFREVFPVMALGEYCNKVPLPSKKNTIN

SEQ ID NO: 59 - protein, 759 aa, Cucurbita pepo
MWRLKVADGGNDPYIYSMSNHLGRQVWEFCADAGSPDERAEVERVRNEFTKNRLKGFPSADLLWRLQLLREKNFKQSIPPVKVEDGEEITYEMASDAMKRGAYFLEAIQASDGNWASDLGGPMFLLPGLVIALYVTGVLNSAFSPEHKKEMMRYLYNHQNEDGGWGLHVGGHSNMFCTTFNYISLRLLGEEPDVEAVAKGRIWIRDHGGVTSILSWGKTWLSILNLFDWSASNPMPPEYWMFPTWVPIHPSNMMCYTRITYMPMSYLYGKRFQAPLTPLVLQLRDELHTQAYEKINWRKVRHMCATEDLYFPHPFVQDLLWDTLYMLSEPLMTRWPFNKLIRQKALDETMRHIHYEDENSRYICLGPVEKPLCMLACWVEDPNSEYVKKHFARIPDYLWMAEDGMRMQGYNGSQLWDTAFSQALLACNITHDIGSALNNGHEFIKNSQVRNNPPGDPNVWFRHIHKGAWPFSTRDHGWLISDCTAEGLKASLMLSKLPSKIVGEPLEKYDAVNVLLSLQNENGGFASYELTRSYPWLELINPAETFGDIVIDYQHVECTSSALQAILLFRKQYPEHRKKEINNFINKAVQFLQDIQLPDGSWYGNWGICYTYAGWFGIKGLVAAGRTYNNCEALRKGANFLIKIQNPEGGFGESYLSCPYKRYIPLDGKRSNLVQTAWGMMGLIAAGQADVDPGPIHRAAKLLINSQTEDGDFPQEEIMGVFNKNCMITYAAFREVFPVMALGEYCNKVPLPSKKNTIN

SEQ ID NO: 60 - protein, 785 aa, Unknown
  Cucumissativus L. cv. Gy14
MWRLKVGKESVGEKEEKWIKSISNHLGRQVWEFCAENDDDDDDEAVIHVVANSSKHLLQQQRRQSSFENARKQFRNNRFHRKQSSDLFLTIQYEKEIARNGAKNGGNTKVKEGEDVKKEAVNNTLERALSFYSAIQTSDGNWASDLGGPMFLLPGLVIALYVTGVLNSVLSKHHRQEMCRYIYNHQNEDGGWGLHIEGSSTMFGSALNYVALRLLGEDANGGECGAMTKARSWILERGGATAITSWGKLWLSVLGVYEWSGNNPLPPEFWLLPYSLPFHPGRMWCHCRMVYLPMSYLYGKRFVGPITHMVLSLRKELYTIPYHEIDWNRSRNTCAQEDLYYPHPKMQDILWGSIYHVYEPLFNGWPGRRLREKAMKIAMEHIHYEDENSRYICLGPVNKVLNMLCCWVEDPYSDAFKFHLQRIPDYLWLAEDGMRMQGYNGSQLWDTAFSIQAILSTKLIDTFGSTLRKAHHFVKHSQIQEDCPGDPNVWFRHIHKGAWPFSTRDHGWLISDCTAEGLKASLMLSKLPSKIVGEPLEKNRLCDAVNVLLSLQNENGGFASYELTRSYPWLELINPAETFGDIVIDYSYVECTSATMEALALFKKLHPGHRTKEIDAALAKAANFLENMQRTDGSWYGCWGVCFTYAGWFGIKGLVAAGRTYNNCVAIRKACHFLLSKELPGGGWGESYLSCQNKVYTNLEGNRPHLVNTAWVLMALIEAGQGERDPAPLHRAARLLINSQLENGDFPQQEIMGVFNKNCMITYAAYRNIFPIWALGEYSHRVLTE

SEQ ID NO: 61 - protein, 758 aa, Vitis vinifera
MWRLKVADGGNDPYIDSTNNFVGRQIWEFDPDYGTPDERAEVEAARENFWKNRFQVKLSSDLLWRMQFARENPCVTNLPQIKVQDLEEVTEEVVTTTLRRGLNFYSTIQAHDGHWPGDCGGPMFLLPGLVITLYVTGALHVVLSIEQQREMCRYLCNHQNEDGGWGLHIEGPSTMFGTVLNYVTLRLLGEADFGAKGAMEKGQKWILDHGGATAITSWGKMWLSVLGAYEWFGTNPLPPEMWLCPYILPVHPGRMWCHCRMVYLPMSYLYGKKFVGPITSTIISLRKELYIVPYHEVDWNQARNQCAKEDLYYPHPLVQDILWASLHKVLEPILGHWPGNNLREKALCTVMQHVHYEDENTRYICLGPVNKVLNMLCCWIEDPNSEAFKLHIPRIFDYLWIAEDGMKMQGYSGSQLWDTSFAVQAIISTNLGEEYGLTLRKAHEFIKNSQVLEDCPGDLKFWYRHISKGAWPFSTADQGWPISDCTAEGLKAVLLLSKLPVETVGEPLDMKHLSDAVNVILSLQNADGGFATYELTRSYRWVELINPAETFGDIVIDYPYVECTSAAIQALTSFKKLYPEHRRHEIENCISKAAKFIEEIQAPDGSWYGCWGVCFTYGGWFGITGLIAAGNTYSNCPCIRKACDYLLSKELASGGWGESYLSCQNKVYTNLPGDKPHIVNTAWAMLALIEAGQAGRDPNPLHRAARILINSQMKNGDFPQEEIMGVFNKNCMINYSAYRNIFPIWALGEHRSRVLHSS

SEQ ID NO: 62 - protein, 786 aa, Gynostemma cardiospermum
MGNIKERKGKDRERQREMWKLKIGGESVGKNNEEKWLKSISNHLGRQVWEFCPKLETETETETESQIENARNTFHLNRFHKKQSSDLFITLQYGNEIAKIEGVKIKEKEEVREEAVKTTLERALNFYSAIQTSDGHWASDLGGPMFLLPGLVITLYVTGVLNSVLSKHHRQEICRYLYNHQNEDGGWGLHIEGPSTMFGSVLNYVALRLLAQDSEYDSILKGRRWILDHGGATGITSWGKLWLSVLGVYEWCGNNPLPPEFWILPYFLPFHPGRMWCHCRMVYLPMSYLYGKRFVGPITPTVLSLRKELYTVPYHEIDWNKSRNTCAKEDLYYPHPKIQDILWASLHHVYEPFFTRWPGKRLRDKALHAAMQHIHYEDENTRYICLGPVNKVLNMLCCWVEDPHSDAFKFHLQRVYDYLWVAEDGMKMQGYNGSQLWDTAFSVQAIISTKLTENFGPTLRKAHNFIKLSQIQQDCPGDPNIWYRHIHKGAWPFSTADHGWLISDCTAEGLKASLLLSKVSSNTVGEPLERNRLFDAVNVLLSLQNKNGGIASYELTRSYPWLELINPAETFGDIVIDYPYVECTSATIEALALFKKLYPGHRTKEIDNVIAKAAKFLEDMQREDGSWYGCWGVCFTYAGWFGIKGLVAAGRQYNNSPTIRKACNFILSKELPGGVGGWGESYLSCQNKVYTNLDGNRPHLVNTSWALMALIEAGQADRDPTPLHRAARLLINSQLENGDFPQQEIMGVFNKNCMITYAAYRNIFPIWALGEYCHRVLNQHRSSPLF

SEQ ID NO: 63 - protein, 769 aa, Gynostemma cardiospermum
MWKLKIGGESVGKNNEEKWLKSISNHLGRQVWEFCPKLETETETETESQIENARNTFHLNRFHKKQSSDLFITLQYGNEIAKIEGVKIKEKEEVREEAVKTTLERALNFYSAIQTSDGHWASDLGGPMFLLPGLVITLYVTGVLNSVLSKHHRQEICRYLYNHQNEDGGWGLHIEGPSTMFGSVLNYVALRLLAQDSEYDSILKGRRWILDHGGATGITSWGKLWLSVLGVYEWCGNNPLPPEFWILPYFLPFHPGRMWCHCRMVYLPMSYLYGKRFVGPITPTVLSLRKELYTVPYHEIDWNKSRNTCAKEDLYYPHPKIQDILWASLHHVYEPFFTRWPGKRLRDKALHAAMQHIHYEDENTRYICLGPVNKVLNMLCCWVEDPHSDAFKFHLQRVYDYLWVAEDGMKMQGYNGSQLWDTAFSVQAIISTKLTENFGPTLRKAHNFIKLSQIQQDCPGDPNIWYRHIHKGAWPFSTADHGWLISDCTAEGLKASLLLSKVSSNTVGEPLERNRLFDAVNVLLSLQNKNGGIASYELTRSYPWLELINPAETFGDIVIDYPYVECTSATIEALALFKKLYPGHRTKEIDNVIAKAAKFLEDMQREDGSWYGCWGVCFTYAGWFGIKGLVAAGRQYNNSPTIRKACNFILSKELPGGVGGWGESYLSCQNKVYTNLDGNRPHLVNTSWALMALIEAGQADRDPTPLHRAARLLINSQLENGDFPQQEIMGVFNKNCMITYAAYRNIFPIWALGEYCHRVLNQHRSSPLF

SEQ ID NO: 64 - protein, 759 aa, Siraitia grosvenorii
MWRLKVGAESVGENDEKWLKSISNHLGRQVWEFCPDAGTQQQLLQVHKARKAFHDDRFHRKQSSDLFITIQYGKEVENGGKTAGVKLKEGEEVRKEAVESSLERALSFYSSIQTSDGNWASDLGGPMFLLPGLVIALYVTGVLNSVLSKHHRQEMCRYVYNHQNEDGGWGLHIEGPSTMFGSALNYVALRLLGEDANAGAMPKARAWILDHGGATGITSWGKLWLSVLGVYEWSGNNPLPPEFWLFPYFLPFHPGRMWCHCRMVYLPMSYLYGKRFVGPITPIVLSLRKELYAVPYHEIDWNKSRNTCAKEDLYYPHPKMQDILWGSLHHVYEPLFTRWPAKRLREKALQTAMQHIHYEDENTRYICLGPVNKVLNLLCCWVEDPYSDAFKLHLQRVHDYLWVAEDGMKMQGYNGSQLWDTAFSIQAIVSTKLVDNYGPTLRKAHDFVKSSQIQQDCPGDPNVWYRHIHKGAWPFSTRDHGWLISDCTAEGLKAALMLSKLPSETVGESLERNRLCDAVNVLLSLQNDNGGFASYELTRSYPWLELINPAETFGDIVIDYPYVECTSATMEALTLFKKLHPGHRTKEIDTAIVRAANFLENMQRTDGSWYGCWGVCFTYAGWFGIKGLVAAGRTYNNCLAIRKACDFLLSKELPGGGWGESYLSCQNKVYTNLEGNRPHLVNTAWVLMALIEAGQAERDPTPLHRAARLLINSQLENGDFPQQEIMGVFNKNCMITYAAYRNIFPIWALGEYCHRVLTE

SEQ ID NO: 65 - protein, 765 aa, Lagenaria siceraria
MWRLKVGADTVPADPSNAGGWLSTLSNHLGRQVWEFCAELGSPEDLQQIQHARQRFSDHRFEKKHSADLLMRMQFAKENSSFVNLPQIKVKDKEDVIEEAVTRTLRRAINFYSTIQADDGNWASDLGGPMFLLPGLVIALYVTGVLNSVLSTEHQREICRYLYNHQNRDGGWGLHIEGPSTMFGSVLNYVTLRLLGEEAEDGQGGVDKARKWILDHGGATAITSWGKMWLSVLGIYEWAGNNPLPPELWLLPYLLPCHPGRMWCHCRMVYLPMCYLYGKRFVGPITPIIRSLRKELYLVPYHEVDWNEARNQCAKEDLYYPHPLVQDVLWASLHHVYEPLFMRWPAKRLREKALRSVMQHIHYEDENSRYICLGPVNKVLNMLCCWAEDPHSEAFKLHIPRIYDYLWIAEDGMRMQGYNGSQLWDTAFSVQAIISTKLAEEYGTTLRKAHKYIKDSQVLEDCPGDPNVWFRHIHKGAWPFSTRDHGWLISDCTAEGLKASLMLSKLPSKIVGEPLEKERIYDAVNVLLSLQNENGGFASYELTRSYPWLELINPAETFGDIVIDYPYVECTSAAIQALAAFKKLYPGHRSNEIGNCIAKAADFIESIQATDGSWYGSWGVCFTYAGWFGIKGLVAAGRTYNNCSSLRKACDFLLSKELAAGGWGESYLSCQDKVYTNIKDDRPHIVNTGWATLSLIDAGQAERDPTPLHRAARVLINSQMDDGDFPQEEIMGVFNKNCMITYAAYRNIFPIWALGEYRCRVLQAP

SEQ ID NO: 66 - protein, 758 aa, Linum usitatissimum
MWRLKIAEGGNPWLRTTNDHVGRQVWEFDPELGSPEELSAIELARRDFTKNRFEHKHSADLLMRIQFSKENPLERVLPQVKLKEKEDVTKEAVKSTLERALSFYSAVQTSDGNWASDLGGPMFLLPGLVIALSVTGAMNAVLSEQHKSEMRRYLYNHQNEDGGWGLHIEGPSTMFGSVLSYVTLRLLGEGANDGEGAMEKGRDWIVNHGGATAITSWGKMWLSVLGVFEWSGNNPLPPEIWLLPYMLPIHPGRMWCHCRMVYLPMSYLYGKRFVGPITPTVLSLRKELFSTPYHEIDWNRARNECAKEDLYYPHPLIQDLLWGSLHNFVEPILMAWPGKKLREKALRTTLEHIHYEDENTRYICLGPVNKVLNLLCCWVEDPYSDAFKLHLQRVHDYLWVAEDGMKMQGYNGSQLWDTAFSIQAILSTNLIEEYASTLKKAHAFVKDSQIQEDCPGDPNVWFRHIHKGAWPFSTRDHGWLISDCTAEGLKASLMLSKLPSTMVGEPLEANRLCDAVNVLLSLQNDNGGFASYELTRSYPWLELINPAETFGDIVIDYPYVECTSATMEALTLFKKLHPGHRTKEIDTCIKKAVAFLEKMQRADGSWYGCWGVCFTYAGWFGIKGLVAAGRTYNSCLAIRKACEFLLSKELPGGGWGESYLSCQNKVYTNLEGNKPHLVNTAWVLMALIEAGQAERDPAPLHRAARFLINSQMENGDFPQQEIMGVFNRNCMITYSAYRDIFPIWALGEYRTKVLHASS

SEQ ID NO: 67 - protein, 759 aa, Linum usitatissimum
MWRLKISEGGNPWLRTTNNHVGRQVWEFDPELGSPEELSAIELARRDFTKNRFEQKHSADLLMRIQFSKENPLERVLPQVKLREKEDVTKEAVKSTLERALSFYSAVQTSDGNWASDLGGPMFLLPGLVIALSVTGAMNAVLSEQHKSEMCRYLYNHQNEDGGWGLHIEGPSTMFGSVLSYVTLRLLGEGPNDGEGAMGKGRDWILNHGGATAITSWGKLWLSVLGVFEWSGNNPLPPEIWLLPYMLPIHPGRMWCHCRMVYLPMSYLYGKRFVGPITPTVLSLRKELFSTPYHEIDWNRARNECAKEDLYYPHPLIQDLLWGSLHNFVEPILMAWPGKKLREKALRTTLEHIHYEDENTRYICLGPVNKVLNLLCCWVEDPYSDAFKLHLQRVHDYLWVAEDGMKMQGYNGSQLWDTAFSIQAILSTNLVEEYASTLKKAHTYVKDSQIQEDCPGDPNVWFRHIHKGAWPFSTRDHGWLISDCTAEGLKASLMLSKLPSTMVGEPLEANRLCDAVNVLLSLQNDNGGFASYELTRSYPWLELINPAETFGDIVIDYPYVECTSATMEALTLFKKLHPGHRTKEIDTCIKKAVAFLEKMQRADGSWYGCWGVCFTYAGWFGIKGLVAAGRTYNSCLAIRKACEFLLSKELPGGGWGESYLSCQNKVYTNLEGNKPHLVNTAWVLMALIEAGQAERDPAPLHRAARFLINSQMENGDFPQQDIMGVFNRNCMITYAAYRDIFPIWALGEYRTKVLHASPS

SEQ ID NO: 68 - protein, 762 aa, Momordica charantia
MWRLKVGAESVGENDEKWVKSISNHLGRQVWEFCPDAGTPQQLLQIEKARKAFQDNRFHRKQTSDLLVSIQCEKGTTNGARVPGTKLKEGEEVRKEAVKSTLERALSFYSSIQTSDGNWASDLGGPMFLLPGLVIALCVTGALNSVLSKHHRQEMCRYLYNHQNEDGGWGLHIESPSTMFGSALNYVALRLLGEDADGGEGRAMTKARAWILGHGGATAITSWGKLWLSVLGVYEWSGNNPLPPEFWLLPYFLPFHPGRMWCHCRMVYLPMSYLYGKRFVGPITPVVLSLRKELYTVPYHEIDWNKSRNTCAKEDLYYPHSKMQDILWGSIHHMYEPLFTHWPAKRLREKALKTAMQHIHYEDENTRYICLGPVNKVLNMLCCWVEDPYSEAFKLHLQRVHDYLWVAEDGMKMQGYNGSQLWDTAFSVQAIISTKLVDNYGPTLRKAHDYVKNSQIQQDCPGEPNVWFRHIHKGAWPFSTRDHGWLISDCTAEGLKASLMLSKLPSETVGEPLERNRLCDAVNVLLSLQNDNGGFASYELTRSYPWLELINPAETFGDIVIDYPYVECTSATMEALALFKKLHPGHRTKEIDTAIARAADFLENMQRTDGSWYGCWGVCFTYAGWFGIKGLVAAGRAYSNCLAIRKACDFLLSKELPGGGWGESYLSCQNKVYTNLEGNRPHLVNTAWVLMALIEAGQGERDPAPLHRAARLLINSQLENGDFPQEEIMGVFNKNCMITYAAYRNIFPIWALGEYCHRVLTE

SEQ ID NO: 69 - protein, 703 aa, Momordica charantia
MGSNNFVGRKMWRLKLGEGANNPYLWSSNNFVGRQTWDFEADEGTPEERAQIEAARKTYFQNRFKVQCSNDLFWKFQVFAFYITGHLGTIFPEEHQKELLRYAYCHQNEDGGWGLYIMGESCMLCTVLNYIQLRLLGEEPDTDACNRARKWILDHGGALYIPSWGKIWLSILGVYEWDGANPMPPEFWLFGNALPLKPGHLLGYSRLTLLPMSYLYGKRFVGTLTPLILQLRQEIYTQPYSNIKWSPARHYCAKEDKCFERSWIQKLAWDAVHYLGEPLLGSWAFKSVRNRALQIARFHIDYEDQNSHYITIGCVEKPLCTLATWVDDPNGQAYKKHLARVKDYLWIGEDGMKIQSFGSQSWDVAFAIQAILATNFHREFSDTLKKGHDFIKKSQIRENPSGDFQSMYRHISKGSWSFSDQDHGWQLSDCTAENLTCCLILSTMPPDMVGDPMKPQCFFDAVNIILSLQAKNGGVSAWEPTGIVSSWFERLNPVEFLEYSILELEYVECTSSSLQALVLFKKLFPNHRKKEIETFITKGVNYIKEMQKDDGSWYGNWGICHLYATYFAIKGLVAVGYSYDSCSTIRRGVDFLLKIQCPDGGWGESHVSVTKKVYTPLQHNASNLVQTSFALMALIHAQQANRDPTPVHRAAKLLINSQLEDGDYPQQEITGAFMGNCMLHYPLYKNVFPLWALADYCNLVPLP

SEQ ID NO: 70 - protein, 756 aa, Pisum sativum
MWKLKVAEGGTPWLRTLNNHVGRQVWEFDPHSGSPQDLDDIETARRNFHDNRFTHKHSDDLLMRLQFAKENPMNEVLPKVKVKDVEDVTEEAVATTLRRGLNFYSTIQSHDGHWPGDLGGPMFLMPGLVITLSVTGALNAVLTDEHRKEMRRYLYNHQNKDGGWGLHIEGPSTMFGSVLCYVTLRLLGEGPNDGEGDMERGRDWILEHGGATYITSWGKMWLSVLGVFEWSGNNPMPPEIWLLPYALPVHPGRMWCHCRMVYLPMSYLYGKRFVGPITPTVLSLRKELFTVPYHDIDWNQARNLCAKEDLYYPHPLVQDILWATLHKFVEPVFMNWPGKKLREKAIKTAIEHIHYEDENTRYICIGPVNKVLNMLCCWVEDPNSEAFKLHLPRIYDYLWVAEDGMKMQGYNGSQLWDTAFAAQAIISTNLIDEFGPTLKKAHAFIKNSQVSEDCPGDLSKWYRHISKGAWPFSTADHGWPISDCTAEGLKAVLLLSKIAPEIVGEPLDSKRLYDAVNVILSLQNENGGLATYELTRSYTWLEIINPAETFGDIVIDCPYVECTSAAIQALATFGKLYPGHRREEIQCCIEKAVAFIEKIQASDGSWYGSWGVCFTYATWFGIKGLIAAGKNFSNCLSIRKACEFLLSKQLPSGGWAESYLSCQNKVYSNLEGNRSHVVNTGWAMLALIEAEQAKRDPTPLHRAAVCLINSQLENGDFPQEEIMGVFNKNCMITYAAYRCIFPIWALGEYRRVLQAC

SEQ ID NO: 71 - protein, 764 aa, Cucurbita pepo
MWRLKVGAESVGEEDEKWVKSVSNHLGRQVWEFCADAAADTPHQLLQIQNARNHFHHNRFHRKQSSDLFLAIQYEKEIAKGAKGGAVKVKEGEEVGKEAVKSTLERALGFYSAVQTRDGNWASDLGGPLFLLPGLVIALHVTGVLNSVLSKHHRVEMCRYLYNHQNEDGGWGLHIEGTSTMFGSALNYVALRLLGEDADGGDGGAMTKARAWILERGGATAITSWGKLWLSVLGVYEWSGNNPLPPEFWLLPYSLPFHPGRMWCHCRMVYLPMSYLYGKRFVGPITPKVLSLRQELYTIPYHEIDWNKSRNTCAKEDLYYPHPKMQDILWGSIYHVYEPLFTRWPGKRLREKALQAAMKHIHYEDENSRYICLGPVNKVLNMLCCWVEDPYSDAFKLHLQRVHDYLWVAEDGMRMQGYNGSQLWDTAFSIQAIVATKLVDSYAPTLRKAHDFVKDSQIQEDCPGDPNVWFRHIHKGAWPLSTRDHGWLISDCTAEGLKASLMLSKLPSTMVGEPLEKNRLCDAVNVLLSLQNDNGGFASYELTRSYPWLELINPAETFGDIVIDYPYVECTAATMEALTLFKKLHPGHRTKEIDTAIGKAANFLEKMQRADGSWYGCWGVCFTYAGWFGIKGLVAAGRTYNSCLAIRKACEFLLSKELPGGGWGESYLSCQNKVYTNLEGNKPHLVNTAWVLMALIEAGQGERDPAPLHRAARLLMNSQLENGDFVQQEIMGVFNKNCMITYAAYRNIFPIWALGEYCHRVLTE

SEQ ID NO: 72 - protein, 764 aa, Sechium edule
MWRLKVGAESVGEKDEKWVKSVSNHLGRQVWEFCADADAVTPHQSLQIHNARNHFHQNRFRRKQSSDLFLAIQYEKEIAKGVKVGAVKVKEGEEVGKEAVKSTLERALSFYSAVQTSDGNWASDLGGPMFLLPGLVIALYVTGVLNSVLSKHHRLEMCRYLYNHQNEDGGWGLHIEGSSTMFGSALNYVALRLLGEDVDGGDGGAMTKGRAWILDRGSATAITSWGKLWLSVLGVYEWSGNNPLPPEFWLLPYSLPFHPGRMWCHCRMVYLPMSYLYGKRFVGPITPIVLSLRKELYTVPYHEIDWNKSRNTCAKEDLYYPHPKVQDILWGTIHHVYEPLFSGWPCKRLREKALQTAMKHIHYEDENSNYICLGPVNKVLNMLCCWVEDPYSDAFKLHLQRIHDFLWVSEDGMKMQGYNGSQLWDTAFSIQAIASTKLVDTYGHSLRKAHNFVKNSQIQQDCPGDSNVWFRHIHKGAWPFSTRDHGWLISDCTAEGLKASLTLSKLPSQLVGEPLEKNRLYDAVNVLLSLQNENGGFASYELTRSYPWLELINPAETFGDIVIDYSYVECTAATMEALALFKKLHPGHRTKEIDTCIAKAANFLETMQRTDGSWYGCWGVCFTYAGWFGIKGLIAAGRTYKTCIAIRKACDFLLSKELPGGGWGESYLSCQNKVYTNLEGNRPHLVNTAWVLMALIEAGQAKRDQAPLHRAARLLINSQLENGDFPQQEIMGVFNKNCMITYAAYRNIFPIWALGEYYHRVLTK

SEQ ID NO: 73 - protein, 759 aa, Siraitia grosvenorii; identical to SEQ ID NO: 64

SEQ ID NO: 74 - protein, 759 aa, Siraitia grosvenorii; identical to SEQ ID NO: 64

SEQ ID NO: 75 - protein, 763 aa, Trichosanthes kirilowii
MWRLKVGGESVGEKEEKWVKSISNHLGRQVWEFCPHDGTPEQRLQVQKARDAFFRINRFRRKQSSDLFLAIQYEKEIANGATVGGIKLKEGDEVRKEAVKSTLERALNFYSAVQTTDGNWASDLGGPMFLLPGLVIALYVTGVLNSVLSKNHRQEMCRYLYNHQNEDGGWGLHIEGPSTMFGSALNYVALRLLGEDADGGDGGAMTKARAWILDRGGATAITSWGKLWLSVLGVYEWSGNNPLPPEFWLLPYFLPFHPGRMWCHCRMVYLPMSYLYGKRFVGPITPIVLSLRKELYTVPYHEVDWNKSRNTCAKEDLYYPHPKMQDILWGSIHHVYEPLFSRWPGKRLREKALQSAMQHIHYEDENTRYICLGPVNKVLNMLCCWVEDPYSDAFKLHLQRVHDYLWVSEDGMKMQGYNGSQLWDTAFSIQAIASTKLVDSYGPTLRKAHDFVKNSQIQQDCPGDSNVWFRHIHKGAWPFSTRDHGWLISDCTAEGLKASLMLSKLPSEIVGPSLEKNRLCDAVNVLLSLQNDNGGFASYELTRSYPWLELINPAETFGDIVIDYSYVECTSATMEALTLFKKLHPGHRTKEIDTAIGKAANFLEKMQRTDGSWYGCWGVCFTYAGWFGIKGLVAAGRTYNSCIAIRKACDFLLSKELPGGGWGESYLSCQNKVYTNLEGNRPHLVNTAWVLMALIEAGQAERDPAPLHRAARLLINSQLENGDFPQEEIMGVFNKNCMITYAAYRNIFPIWALGEYCHRVLTE

SEQ ID NO: 76 - protein, 775 aa, Trichosanthes kirilowii
MGRRERWGGRREIMWRLKVGGESVGEKEEKWVKSISNHLGRQVWEFCPHDGTPEQRLQVQKARDAFRINRFRRKQSSDLFLAIQYEKEIANGATVGGIKLKEGDEVRKEAVKSTLERALNFYSAVQTTDGNWASDLGGPMFLLPGLVIALYVTGVLNSVLSKNHRQEMCRYLYNHQNEDGGWGLHIEGPSTMFGSALNYVALRLLGEDADGGDGGAMTKARAWILDRGGATAITSWGKLWLSVLGVYEWSGNNPLPPEFWLLPYFLPFHPGRMWCHCRMVYLPMSYLYGKRFVGPITPIVLSLRKELYTVPYHEVDWNKSRNTCAKEDLYYPHPKMQDILWGSIHHVYEPLFSRWPGKRLREKALQSAMQHIHYEDENTRYICLGPVNKVLNMLCCWVEDPYSDAFKLHLQRVHDYLWVSEDGMKMQGYNGSQLWDTAFSIQAIASTKLVDSYGPTLRKAHDFVKNSQIQQDCPGDSNVWFRHIHKGAWPFSTRDHGWLISDCTAEGLKASLMLSKLPSEIVGPSLEKNRLCDAVNVLLSLQNDNGGFASYELTRSYPWLELINPAETFGDIVIDYSYVECTSATMEALTLFKKLHPGHRTKEIDTAIGKAANFLEKMQRTDGSWYGCWGVCFTYAGWFGIKGLVAAGRTYNSCIAIRKACDFLLSKELPGGGWGESYLSCQNKVYTNLEGNRPHLVNTAWVLMALIEAGQAERDPAPLHRAARLLINSQLENGDFPQEEIMGVFNKNCMITYAAYRNIFPIWALGEYCHRVLTE

SEQ ID NO: 77 - protein, 757 aa, Solanum tuberosum
MWKLKVAEGGSPWLRTLNGHIGRQVWEFDPNLGSPKDLEEIEKFRAEFYKNRFETKHSSDLLMRYQFSKENPVGTILPRVQVKDIGDITEDNVATTLRRAISFYSTLQAHDGHWAADCGGPMFLLPGLVIALSVTGALNAVLSEEHKREICRYLYNHQNCDGGWGLHIESHSTMFGSVLSYVTLRLLGEKANGGEGAMEKGRKWILDHGTATAITSWGKMWLSVLGLFDWSGNNPLPPEMWLLPYILPFHPGRMWCHCRMVYLPMSYLYGKRFVGPITPTVLSLRKELFTVPYHKINWNKARNECAKEDLYYPHPLLQDILWTSLDKLIEPLFMHWPGKKLREKALSTVMDHIHYEDENTRYICLGPVNKVLNMLCCWVEDSSSEAFKLHLPRLYDYLWIAEDGMKIQGYNGSQSWDTSFAIQAIISTNLVEEYGPTLRKAHKFMKNSQVLDDCPGNLDFWYRHISKGAWPFSTADHGWPISDCTAEGLKACLLLSKLPVEIVGEPLKANRLYDAVNVMLSLQNPDGGIGTYELSRSYPWLEIINPAETFGDIVIDYPYVECTSAIIQALAAFKKLYPGYRKEDVERCIEKGAAFIEKIQEADGSWYGCWGVCFTYGTWFGVKGLLDAGRNFNNSYNIRKACDFLLSKQVVSGGWGESYLSCQNKVYTNLKGNKSHSVCTAWAMLALIEAGQGERDPTPLHRAAKVLINSQLENGDFPQQEISGVFNKNCMISYSAYRNIFPIWALGQYQSQLLNPQ

SEQ ID NO: 78 - protein, 768 aa, Zea mays
MWKLKVAAEGGGGPLLRSTNRFVGRTVWEFEPDLGTPEQRAEVEKARRDFSDHRFQRRHSADVLMRMQMQQYSKGTPLKLDLPAVKKLGEDEDVTEEAVSTSLKRAINRVSALQAHDGHWPGDCSGPLFLLPGLIITLYVTGALNAVLSSEHQREIRRYLYNHQNEDGGWGLHMEGHSAMLGTTLNYVALRLIGEGPDSGGDDGAAMERGRNWILQRGGATYTTSWGKFWLTVLGVYDWSGNNPLPPEMWLLPYHLPFHPGRMWCHCRAVYLPMSYVYGKRFVGRITPLVLELRNELYGDPYSLIDWNKARNQCAKEDLYYPHSFLQDVLWATLHKFVEPVMMHWPGIKFREIALRTAMRHIHYEDESTRYINLGPVNKVLNMLACWIEDPNSEAFKLHVPRIYDYLWLAEDGMKMKGYNGSQLWDAGLTVLAIVNTDLIEEFGPTLKLAHAFVKNSQIIDNCLEDLNQWYRHMSKGGWPFSTADHGWCVSDCTATGLEATLLLSTISPQIVGEAMEVGRVYDGVNCLISLMNNNGGFATFELTRSYAWLEHINPSETFGGIMIDYPYVECTSSSIQALALFKKLYPRHRTEEIDSCISKGANFIESMQRNDGSWYGSWGVCFTYATWFAVFGLACAGRTFEDSPAIKKACEFLLSKELPSGGWGESYLSCQDKVYTNLEGMRPHAVNTSWAMLALIRVGQAERDPAPLHRAARVLINLQSEDGEFPQQEIIGVFNQNCMIGYSQYRNIFPIWALGEYRTKVHVPRKK

SEQ ID NO: 79 - protein, 757 aa, Tarenaya hassleriana
MWRLKFAEGGSPWLRTTNNHVGRQVWEFDPRLGTPEELAEIEEARKSFAENRFVHKHSSDLLMRLQFSRENPVRQVLPQVEVKDTDDISKEAVKSTLERALSFYSAVQTSDGNWASDLGGPMFLLPGLVIALSITGALNAVLSEQHKQEMCRYLYNHQNEDGGWGLHIEGPSTMFGSVLNYVTMRLLGEGPNDGDGAMEKGRDWILNHGGATYITSWGKMWLTVLGVFEWSGNNPLPPEIWLLPYILPIHPGRMWCHCRMVYLPMSYLYGKRFVGPITPTVLSLRKELFTVPYHEVDWNKARNLCAKEDLYYPHPVVQDILWASLHKVVEPILMRWPVTKLREKALRTAIEHIHYEDENTRYICLGPVNKVLNLLCCWVEDPYSDAFKLHLQRVHDYLWVAEDGMKMQGYNGSQLWDTAFSIQAIFATNFVEEYGDVLKKANSYIKDSQIQEDCPGDPNVWFRHIHKGAWPFSTRDHGWLISDCTAEGLKASLMLSKLPSTMVGEPLEANRLCDAVNVLLSLQNDNGGFASYELTRSYPWLELINPAETFGDIVIDYPYVECTSATMEALTLFKKLHPGHRTKEIDQCIKKAAKFLEKMQRADGSWYGCWGVCFTYAGWFGIKGLVAAGRTYNSCLAIRKACEFLLSKELPGGGWGESYLSCQNKVYTNLEGNKPHLVNTAWVLMALIEAGQHERDPKPLHRAARYLINSQLENGDFPQQEIMGVFNKNCMITYAAYRNIFPIWALGEYRSQVLQAA

SEQ ID NO: 80 - protein, 663 aa, Gossypium hirsutum
MDRQSFRDNRFHRKQSSDLFLAIQFAEEKQSVTNLPQTKLEEFEDVKKEAVKSTLERALSFYSAVQTSDGNWASDLGGPMFLLPGLVITLYVTGALNTVLSKEHQYEICRYLYNHQNRDGGWGLHIEGPSTMFGTVLNYVSLRLLGEGAEGGEGAIEKARRMWCHCRMVYLPMSFLYGKKFVGPITPTILSLRKELYTVPYHEVDWNKARNACAKEDLYYPHPLVQDILWASLHYLYEPMLKYWPCKSLREKALQIVMQHIHYEDENTRYICLGPVNKVLNMLCCWVEDPYSESFKLHLPRILDYLWIAEDGMKMQGYNGSQLWDTAFAIQAIISTGLADEYGSVLRKAHDFLKDSQIQEDCPGDPNVWFRHIHKGAWPFSTRDHGWLISDCTAEGLKASLMLSKLPSTMVGEPLEVNRLCDAVNVLLSLQNDNGGFASYELTRSYPWLELINPAETFGDIVIDYPYVECTSATMEALTLFKKLHPGHRTKEIDIGRAVEFLEKMQRADGSWYGCWGVCFTYAGWFGIKGLVAAGRTYNSCLAIRKACEFLLSKELPGGGWGESYLSCQNKVYTNLEGNKPHLVNTAWVLMALIEAGQAERDPTPLHRAAKILINSQMEDGDFPQEEIMGVFNKNCMISYSAYRNIFPIWALGEYHCRVLQAP

SEQ ID NO: 81 - DNA, 1401 bp, Artificial Sequence
  Synthetic
atgctgctccagtccaacccgatggagaacgagacggagacgacggtgagccgccggcgcagaatattattatttcctgtaccatttcaaggtcatataaatccaatgttacaacttgcaaatgtcctttatagcaaaggattctccatcactattttccataccaatttcaacagtccaaagacctcaaattacccccactttacttttcgatttatcctagacaatgacccccaagataaaagaatttccaatctccccacacacggcccagcagcttcaatcaggattccatttttcaatgagtacagagccgatgaattaagacgtgagctagaattactcatgttggcttccgaagaagatggagaggtaagttgcctgattgcagatcagatatggtattttactcaatctgtcgcggatagcctcaatcttagaagattagtcttggttacatcctcattgttcaacttccacgcacatgtaagcctaccgcaattcgatgagttaggatatttggaccctgatgataaaactcggctagaagagcaagcttcaggatttcctatgctaaaagtaaaagatataaaatgtagcttttctatgtggaagaagtacaaggaatatttcgagaacattactaagcagacgaaagcgtcatccggcgtgatttggaatagctttaaagaattggaagagtctgagcttgaaaccgtaattcgggaaataccagccccttcttttcttattcctctaccaaaacacttaacggcatcttcgtcgtctttattagatcacgatcgtacagtgttcccgtggctggatcaacaacctagcaggtcggtcttatacgtatcatttggaagtggtactgaggtgttagatgaaaaagactttttagaaatagctagaggtttggttgactcaaagcaatcttttttgtgggtcgtcagacccggcttcgttaaaggttcaacgtgggtcgaacctctaccagatggtttcttgggtgaaagaggtagaattgttaagtgggtaccacaacaagaagtcctagctcatggagctataggtgcattttggactcactcaggctggaactcaacattggaatctgtgtgcgagggagtaccaatgatcttctctgatttcggtttagatcagcctctgaacgcaaggtacatgtcggatgtactaaaggtaggggtctatttggaaaatggatgggagagaggagagattgctaatgctatcagacgcgtaatggttgatgaggaaggtgaatatatcagacaaaatgccagagtgttaaagcaaaaagccgatgttagtttaatgaagggaggtagttcttacgagtcgttggagagtcttgtctcatacatatcttccttgtaa

SEQ ID NO: 82 - DNA, 1344 bp, Artificial Sequence
  Synthetic
atggaggagcacgggggccgccggcggcccctggtcgtgctcacgtcgtgcccctttcatggacatatgattccaacattacaattagctacaacattacatgcaaaaggatttactattgctattgcacactctaagctcaatccgcctaacccgtccaatcatcctagcgattttatttttcttccactctcagatgacattcccgctatcgataattccggttctttcacagattttatacgaaaacttaataacaactgtaagccatcattcaaggaacacctaacccggctcatatcggagggcaacaaatccatagtcgtggtttacgacaacgtccttcattttgccggtatagtagctgttgacctaaatttagctgccgtaatgttcaggagtagttcagcggcttattttccagcatttttagcccgtcaacaattgagtcaaaggggacgattcctagaagaggactttaaaatggatgagatggtccctaatcattacccaatgcgttacaaggatctccctttctctaagtctccaattgaagattggcggcaattatactcaaatttttcccaacaggcacatccatccgctgtcatctggaatactataaaattccttgaacacgaatctctgacccaagttcacaactactatcaggttcctgtctttgctgttggcccactgcataagatgactcctacgtcctatatcgggtcacatgaggaagataatggttgcattacctggctagacaaacaacctcctaaatctgttgtatacattagctttggaagtttagcaacaatggaagccaaaatattgactgagatggcgttcggtctggccaaatcaaatcagaggttcctttgggcagtgcgtcctggactgatttctggttctgggtgggttgaatttttaccagaaggttttgtagaagaaactcgtggtcgaggtttgatcgtaaaatgggcacctcaaaaagaagtgctagctcattttgcagtaggtggtttctggtcacactgtggttggaacagttgcttggaatctatcagttctggcgtagttatgatgtgtcaaccctttatagcagatcaaggagtcaacgctcgatatgtgagttacgtatggaagataggcctcgaattggagcgtgttgaaagaggtgagatagaaaggatgataaagagagtaatggtagacgacgaaggcgaagaaatgagagtgagagtaaacgacatgaaaaagatggttaaagaagctcttgagattggtggttcgtcacaggaatcctttgaagggttagtagaatttcttttatcttgctaa

SEQ ID NO: 83 - DNA, 1425 bp, Artificial Sequence
  Synthetic
atggtacagccgagagttttactgttcccttttcccgcgttggggcatgtgaaaccatttctatccctcgctgagcttttatcggacgccggaatcgatgtcgtttttctaagtacagaatataatcaccggcgtatttcaaacacggaagcacttgctagccgcttcccaactttacatttcgaaaccatacctgatggtttgccacctaatgaatctagagcattggccgacggccccctgtacttttctatgagggagggtactaagccaagattccgacaactcattcaatcactaaacgatggtaggtggcccataacatgcattatcacggatattatgttgtctagtcctatagaggttgctgaagaatttggcattccagtaatcgcattctgtccgtgtagcgctagatatctgtcaattcatttttttattcctaaattggtcgaggaaggacaaataccatacgcggatgacgatcctatcggtgaaatccagggagtgccgttatttgaagggttgcttcgtaggaatcacttaccaggttcctggtccgacaagtctgctgatatttcgttctctcacggtttaatcaaccaaactttagccgcaggaagagctagcgccttaatacttaataccttcgacgagctcgaagctccttttttgacacatttaagttcgatatttaacaaaatttatacgattggcccactgcatgcattgtcaaaaagtcgcctaggtgattccagttcttcagcttcggcgctttccggtttttggaaggaagacagagcctgcatgagctggttagattgtcaacccccccgatcggttgttttcgtgtcgttcggcagcactatgaaaatgaaggcagatgaattaagagagttttggtacggtctagtctcttcggggaaaccatttttatgcgttttacgttcagatgtagtctctggtggggaagcagctgaattgattgaacagatggcagaagaagagggtgctggcggaaagctgggcatggttgtggagtgggctgcgcaagaaaaagtattgtcacatcctgccgttggcggatttcttacacattgtggttggaatagcaccgtcgaaagcatcgcagctggtgttccgatgatgtgttggccaatactcggagatcaaccgtctaatgcaacttggatagacagagtgtggaagatcggcgtagagaggaacaatagagaatgggatcgactaacggtagaaaagatggttcgggccttgatggaaggtcagaaacgtgtcgagattcaacggtccatggaaaaattgtccaaactggctaatgaaaaagtcgttagagggggtttaagtttcgataacttagaggtgctcgttgaggacattaagaaactgaagccttataaattttaa

SEQ ID NO: 84 - DNA, 1458 bp, Artificial Sequence
  Synthetic
atggcggagcaagctcacgatctattgcatgtactgctttttccgttccctgccgaaggacatataaaaccctttttatgcctcgcagaattattgtgtaatgctggcttccacgttacctttttgaacacggactacaatcataggcgcttacataacctgcatctacttgcagcccgattcccatcgttgcactttgaatccatttctgatgggttacctccagaccagccaagagatatcttggatcctaagttctttattagcatctgtcaagtgacaaaacccctctttagagagttactattatcatataagagaatttctagtgttcaaactggtcgtcctccaataacatgcgtcataactgatgtgatttttcggttcccgattgacgttgctgaagaacttgatatccctgtcttctcattttgtacgttctctgcaaggtttatgttcttgtatttttggattccaaaactcatcgaagacggtcagctcccttacccaaatggtaatataaaccaaaagctgtatggagtagcccccgaggctgaaggcttgcttagatgcaaagatttaccaggtcattgggcatttgctgatgaactcaaggacgatcaacttaacttcgtcgatcagaccactgcgagctccagatcgtcagggttaatattgaatacttttgacgatctggaagcaccatttcttggtagactatccacaatttttaaaaaaatttatgcagttggaccgatacatagtttgttgaacagtcaccattgtggtttgtggaaagaggaccactcttgtttagcttggttggattcacgtgccgctaagtctgtagttttcgtttcatttgggtcattagtgaagatcacgagtaggcaactaatggaattttggcatggccttcttaatagtggtaaaagctttctattcgtcttaaggtccgacgtagtggaaggcgatgatgagaaacaagttgtcaaggaaatatacgaaacaaaggcggagggaaaatggcttgtagttggttgggccccgcaggagaaagttttggcacacgaagctgtgggtggtttcttaacccattctgggtggaatagcattctggaatcgatcgcagcaggggtaccaatgatttcatgccccaagattggagaccagtcctctaattgtacttggataagcaaagtctggaaaatcggtttggagatggaagatagatacgacagagttagcgtcgaaaccatggtacgttctatcatggaacaagaaggcgagaagatgcaaaaaacaattgctgagctagcaaaacaggcgaagtataaggtgtcaaaggatggaacctcgtatcaaaatttagagtgtctgattcaagatattaagaaactaaaccaaatcgaaggctttataaacaatcctaacttctctgatctattaagggtgtaa

SEQ ID NO: 85 - DNA, 1476 bp, Artificial Sequence
  Synthetic
atggtagccccaccaacaaatctgcatttcgttttgtttccactgatggctcaaggtcatttggtcccaatggtagatatagctagaatattggctcaaagaggtgcaaccgtgactataataacaactccatatcatgcaaacagagttagaccagttatttctagggctatcgcaacaaatctaaaaatacaactgttagagttgcaattaagatctactgaagctggtctaccagaaggttgcgagtctttcgaccaattgccttcattcgagtactggaaaaatatatcaactgctatagatttgttgcagcaaccagctgaagatttgctaagagaattgtctccaccaccagattgtattatttctgactttctgtttccttggactactgatgttgcaagaagattgaatatcccaagacttgtgtttaatggtccaggttgtttctatctattgtgcatacatgtagctatcacctctaacatattgggtgaaaacgaaccagtgtctagtaacactgaaagagtcgtcttgccaggtctacctgatagaattgaagtaactaagttacaaattgttggttcttctaggccagctaatgtcgatgaaatgggttcttggttgagagctgtggaagctgagaaagctagttttggtatagttgtaaacacttttgaggagttagaaccagagtacgtggaagaatataaaactgtaaaagataaaaaaatgtggtgtataggtccagtgtcattgtgtaataagactggtccagatttagcagaaagaggtaataaagctgctattacagaacataattgtttgaagtggttggatgaaagaaaactgggtagtgtgttgtatgtgtgtttgggttctttagctagaatttcagccgctcaagccattgaattgggtttaggtttagaatctataaatagaccatttatatggtgtgtgagaaatgagacggacgaattaaaaacttggtttttagacggttttgaggaaagagtaagagatagaggtttaattgtacatggttgggctcctcaagttttaattttatctcatccaactattggtggttttcttactcattgcggatggaatagtacaatagaaagtattacagctggagtaccaatgattacatggccattttttgcagatcaatttttaaatgaggcttttatagttgaagttttaaaaattggtgtaagaataggtgtagaaagagcatgtttatttggtgaggaagataaagttggtgttttggtaaaaaaagaagatgtgaaaaaggcagtcgaatgtttgatggatgaagacgaggacggtgatcaaagaagaaaaagagttatcgaattggctaaaatggctaaaatcgccatggctgaaggtggctcctcatacgagaacgtttcttccttgattagagacgtcaccgagactgtcagagccccacactaa

SEQ ID NO: 86 - DNA, 1488 bp, Artificial Sequence
  Synthetic
atggtatcagaaactactaaatcttctccattgcattttgtattgttcccatttatggcccaaggtcatatgatcccaatggttgacatcgctagattattggctcaaagaggtgtcatcatcacaatagtcacaactccacataacgctgctagatttaagaatgtgttgaacagagcaattgaatcaggtttgccaatcaatttggtacaagtgaaattcccatatcttgaagcaggtttgcaagagggtcaagaaaacatcgattctttagatacaatggaaagaatgatcccattttttaaagctgtaaacttcttggaagaaccagtacagaaattgattgaggaaatgaatccaagaccatcatgcttgatttccgatttctgtcttccatatacttccaagattgccaaaaagtttaatatcccaaaaatcttattccatggtatgggttgtttttgccttctgtgtatgcatgtcttgagaaaaaatagagaaatactagataatttgaaatctgataaggaattattcactgttccagattttccagatagagttgaatttacaagaacacaagtaccagttgaaacttacgtgccagctggtgattggaaagatatatttgacggtatggtggaagctaacgaaacttcctatggagttattgtaaattcttttcaagaattggaacctgcttatgccaaagattataaggaagtcagaagtggtaaggcctggactattggtccagtatctttatgcaataaagttggtgcagataaggcagaaagaggtaacaaatctgacatagaccaagatgaatgtttaaaatggttggattccaagaaacatggtagtgtgttgtatgtctgccttggttcaatctgcaacttgccattgtcacaattaaaggaattgggtctaggtttggaagaatcacaaagaccattcatttgggtaattagaggttgggaaaaatataaagaattggtggaatggttttcagagtctggatttgaagacagaatacaagacagaggattattaatcaaaggttggtcccctcaaatgttaatattgtctcatcctagtgtcggtggttttttgacccattgtggttggaactctacattagaaggtataactgctggtttgccacttctaacttggccattgtttgctgatcagttctgcaacgaaaaattggttgttgaagtcctaaaagccggtgttagatctggtgtggaacaaccaatgaagtggggtgaagaagaaaagattggtgtgttggtggataaggaaggtgttaagaaggccgttgaggaattgatgggtgaatccgatgacgccaaggagcgccgccgcagagcaaaagaattaggtgatagtgcccataaagctgttgaagaaggtggatcttctcattctaacatatcttttttgttacaagacattatggagttagctgaaccaaacaactaa

SEQ ID NO: 87 - DNA, 1488 bp, Artificial Sequence
  Synthetic
atggccttcgagaaaaacaacgaaccatttccactacattttgtcttgttccctttcatggctcagggtcatatgataccaatggttgatatcgctagattgctggctcagagaggtgttcttataacaatcgttacaaccccacataacgctgctagattcaaaaatgtcttgaatagagcaattgaatctggtttgccaattaacttggtccaagtcaagttcccataccaagaagccggtctgcaagagggacaagagaacatggatttgttgactactatggaacaaattacttcattttttaaggctgtgaacctgttaaaggaaccagtccaaaatttaatagaagaaatgtctccaagaccatcatgccttatatctgatatgtgtttgtcttacacttctgagatcgctaagaagttcaaaatcccaaagatattgttccatggtatgggttgtttctgcttattatgcgtgaatgttttgagaaaaaacagagaaatattagacaacttgaagtctgataaggaatatttcatcgtaccatatttcccagatagagtggaatttactagaccacaagttccagtcgagacttacgtcccagctggttggaaagaaatcttggaagacatggttgaagcagataagacatcatacggtgtaattgtaaactctttccaagaattggaaccagcttacgctaaagacttcaaagaagctagatcaggaaaggcatggactatcggtccagtgtccttatgtaataaggttggtgttgacaaggctgaaagaggtaataaatcagacattgatcaagatgaatgtttggagtggttggattcaaaagagccaggttcagtattatatgtgtgtttgggttctatctgtaaccttcctttatctcaattgttggagctaggtcttggtttagaggaatctcaaagaccatttatttgggtcattagaggttgggaaaaatacaaagagctggtcgaatggttttctgagagtggttttgaagacagaatccaagatagaggtttattaattaagggttggtcccctcaaatgttaattctttctcatccatctgtaggtggtttcttaactcattgcggttggaatagtactttagagggtatcactgctggtttacctatgttaacctggccattatttgctgatcaattttgtaatgagaaattagttgtacaaatactaaaagtaggtgtatctgctgaagtaaaagaggtgatgaaatggggtgaagaagaaaaaattggtgtgctagttgataaagagggcgtcaagaaggccgtcgaggagttgatgggtgaatccgatgatgccaaggaacgccgccgcagagctaaagaattgggtgagtctgctcataaggctgtagaagaaggtggttcttctcattcaaatattacattcctgttgcaagatataatgcaattggcacaatctaataactaa

SEQ ID NO: 88 - DNA, 1599 bp, Artificial Sequence
  Synthetic
atgttaatgcatgcattgactcctacagctccatttttctccataaagccaaataccgaacctccatcagccactactcgtcagccaccaatggattctccaccacaaaaacctcacttcttgttgtttccattcatggctcaaggtcacatgatccctatgattgacttagctaagttgttagcccaaagaggggctattatcaccgtcgttaccactccacataacgctgccagatatcactctgttttggctagagctattgattccggtttgcatattcacgtcttgcaattacaattcccatgtaacgagggtggtttgccagaaggttgcgaaaactttgacttgttgccatctttaggttcagcctctactttctttagagcaaccttcttattgtacgaaccttctgaaaaggttttcgaagaattgatcccaagacctacatgtatcatatccgacatgtgtttaccatggacagtccgtttggctcagaaataccacgttccaagattggttttttattccttgtcatgttttttcttgttgtgcatgagatctttgaagaataaccaagctttaatttcttctaagtccgattctgagttggtcactttttccgatttgccagatccagtcgaatttttaaaatcacaattgcctaagtctaatgacgaagaaatggctaagttcggttacgagatcggtgaagctgatagacaatcccatggtgttattgttaacgttttcgaagagatggaaccaaaatacttagcagaatatagaaaggaaagagaatctcctgaaaaggtctggtgtgttggtccagtctccttgtgtaatgacaacaagttagacaaagcccaacgtggtaacaaggcttcaattgatgaaagagaatgtatcgagtggttggacggtcaacaaccatcttctgttgtttacgtctctttaggttctttgtgtaacttagttaccgcccaattgattgagttgggtttgggtttagaagcttctaacaagccattcatttgggttatcagaaaaggtaatattaccgaagaattacagaaatggttggtcgaatatgacttcgaggaaaagactaagggtcgtggtttggttatattgggttgggctccacaagtcttgattttatcccatccagcaatcggttgctttttaacacactgtgggtggaactcctccatcgaaggtatctcagccggtatgccaatgattacctggccattgttcgctgatcaagttttcaatgaaaagttgatcgttgaaatcttgagaataggtgtttctgtcggtatggaaaccgctatgcattggggtgaagaagaagaaaagggtgtcgtcgttaagagagaaaaagtcagagaggcaatagaaagagcaatggatggtgacgaaagagaagaacgtcgtgagagatgcaaggagttggccgaaatggctaagagagctgttgaagaaggtggttcatctcacagaaacttgactttgttgactgaagatattttggtcaatggtggtggtcaggaaagaatggatgacgccgatgacttcccaactatcgtcaactaa

SEQ ID NO: 89 - DNA, 1410 bp, Artificial Sequence
  Synthetic
atggagcaggcgcacgatttactgcatgtcctccttttcccttacccagccaaagggcatataaagccgtttctatgcttggcagaattactgtgtaatgctggcttaaacgtgacatttttgaataccgactataaccaccgaaggttacataatttgcatttgttggccgcttgtttcccctccctacactttgaatcaattagtgatggtcttcaacctgaccaaccacgggatatcctagatccaaaattttatatttctatttgccaagtaacgaagccgctcttccgcgaactgttactatcgtacaaacgtactagctcagttcagacaggaagacctccaatcacttgtgtcataactgatgttatctttagatttcccattgacgtagcagaggaacttgacataccagttttctctttctgtaccttttctgctagattcatgtttttgtatttttggattcccaagttaatcgaagatggtcaacttccttacccaaacggaaatattaatcagaaactctatggggtcgcgcctgaggctgaaggtttattgagatgtaaggatttgcccggtcattgggcatttgcagatgaattgaaagacgatcaactaaacttcgtagatcaaacaactgcaagtttaaggagctcaggccttatattaaatacctttgacgatttagaagccccgtttctaggtagattgagcacaattttcaagaaaatctatgctgttggacctatacatgctttgctgaatagtcaccattgcggtttatggaaagaagaccattcctgcttagcgtggttggattcccgtgctgcccggtcggtggttttcgtgtcgttcggcagtcttgttaaaattacgtcaaggcaattaatggagttttggcacggtctgttgaatagtggtacttcttttctgtttgttttaagatctgacgtcgtcgaaggggatggagaaaaacaagtagttaaggagatatacgaaacgaaagctgaaggcaagtggcttgtcgttggatgggctcctcaggagaaagtgctagcacatgaagctgtgggtggcttcttaacccactccggatggaactctattttggagtcaatcgccgcgggtgtaccaatgattagttgtccaaagataggagaccaatcatctaactgcacttggatctcgaaagtgtggaagataggtctagaaatggaagatcagtacgacagagcaacagtcgaagcaatggtaagaagcataatgaaacatgaaggcgagaaaattcaaaaaacaatcgctgaattggccaagagagctaaatataaggtatctaaggatggtacctcttatagaaatttggagattttaatagaagatattaaaaaaatcaagcccaactaa

SEQ ID NO: 90 - DNA, 1377 bp, Artificial Sequence
  Synthetic
atggaaaataaaacagaaactactgttagaagaagaagaagaattatactgtttccagtaccatttcaaggtcatatcaaccctattttgcaattggctaatgttctatactccaaaggtttctctatcacaatttttcatactaatttcaataagccaaagacctcaaactatccacattttacattcagatttattctggacaatgatccacaagatgaaagaatctccaatttgccaactcatggtccattggccggtatgagaatcccaatcattaacgaacatggtgccgatgaattgcgcagagaattggaattgttaatgttagcttcagaagaagatgaagaagtttcatgtttgatcactgatgctttgtggtactttgctcagtctgtggctgattctctaaatttaagaagacttgtacttatgacttcctcattgtttaacttccatgctcatgtgtctttgccacagtttgatgaattgggttacttggacccagatgataaaactagactggaggaacaagcatctggttttcctatgttgaaggtgaaagatataaaatctgcttatagtaattggcaaatattgaaggaaatcctaggtaaaatgatcaaacaaactaaagcttcttctggtgttatatggaatagttttaaggaattggaagaatctgaattggagacagtgatcagagaaattccagctccatctttcctgatcccattgccaaaacatttgaccgcctctagctcctctttgttggaccacgaccgcaccgtcttccaatggttggaccagcaacccccttcttccgttttgtatgtctcattcggttctacctcagaggttgacgagaaagactttctggaaatagctagaggtttggtggatagtaagcagtcttttttgtgggtcgtaagaccaggttttgttaaaggttctacttgggttgaaccactaccagatggttttttgggtgaaagaggtagaatcgtcaagtgggtcccacaacaagaggtgttggctcatggtgctatcggtgctttttggactcattctggttggaactccactctggagtctgtctgcgagggtgttcctatgatcttttctgatttcggtctggatcaaccactgaacgctagatacatgtctgatgtcttgaaggtgggtgtttacttggaaaatggttgggaaagaggtgaaatcgccaacgccattcgcagagtcatggtcgatgaagaaggtgaatacatcagacaaaatgctagagtgcttaagcagaaagccgacgtttctctgatgaaaggcggttcttcttatgaaagtttagaaagtttagtttcatacatatcttctctctaa

SEQ ID NO: 91 - DNA, 1377 bp, Artificial Sequence
  Synthetic
atggaaaataaaactgaaacaactgttagaagaagaagaagaatcatcttgttcccagtcccattccaaggtcatattaacccaatcttgcaactggctaatgtgctgtactccaaaggtttttctatcactatttttcatactaattttaataaacctaaaacttctaattacccacatttcacatttagatttattttggacaatgacccacaagacgagagaatctccaacctgccaacccatggtccattggccggcatgcgcatcccaatcatcaacgaacatggtgccgatgaattgcgcagagaacttgaattgttgatgttagcatctgaagaagacgaggaagtttcctgtctgattactgacgctttgtggtattttgctcaatctgttgctgattctttgaatttgagaagattggttttgatgacatcttctttgtttaattttcatgctcatgttagtctaccacagtttgatgagcttggttacttagatccagatgataagactagactagaagaacaagcttctggtttcccaatgctaaaggtaaaggatatcaaatccgcttattccaattggcaaatcctaaaggaaatattgggtaaaatgatcaagcagacaagagcttcttctggtgttatctggaactcttttaaagagctagaggagtctgaattggaaacagtcattagagaaatcccagctccatcttttctaattccattgccaaaacatttgaccgcatcatcttcttctctgctagaccatgatagaactgttttccaatggttggatcaacaaccaccatcttccgtcttgtatgtttcttttggctccacttcagaggtggacgagaaagattttctggaaattgctagaggtttagtagatagtaaacagagttttttatgggtagtaagaccaggttttgttaaaggttctacatgggttgagccactacctgatggttttttgggtgaaagaggtagaatagttaaatgggtaccacaacaagaagtcttggcacatggtgccattggtgctttctggacacattctggatggaactctacacttgaatctgtttgtgaaggtgttccaatgattttctccgattttggtttggatcaaccattgaatgctagatacatgtcagacgtcctgaaggttggtgtttacctggaaaacggttgggaacgcggtgaaatcgccaacgccattcgcagagtcatggtggacgaggaaggtgaatacattagacaaaatgccagagtacttaagcaaaaagcagatgtctctttgatgaaaggtggttcttcttatgagtctttggaatcattagtgtcttatatctctagtctctaa

SEQ ID NO: 92 - DNA, 1452 bp, Artificial Sequence
  Synthetic
atggaccaaatggctaaaatcgatgaaaaaaagccacatgtggtttttataccatttccagctcaatctcatatcaagtgcatgcttaagttggccagaatattgcatcaaaaaggtttatatattacatttattaatacagataccaaccatgaaagactggttgctagtggtggtacccagtggttagaaaatgctccaggtttctggtttaagaccgtcccagacggttttggttctgctaaagacgatggtgtgaaaccaactgatgctttgagagaacttatggattacttgaaaactaatttctttgacttgtttttggatttggttctgaaattggaagttccagctacttgtattatctgtgatggttgtatgacatttgccaacactatcagagctgccgaaaagttgaatataccagtcattttgttttggacaatggctgcttgcggatttatggcattttatcaagcaaaggttttaaaagaaaaagagattgtaccagtaaaggatgaaacttacttaactaatggttatttagatatggaaattgactggatacctggtatgaaaagaattagacttagagatttgccagagtttatattggccaccaaacagaattattttgccttcgagtttttgttcgaaactgcccaattggctgataaggtgtctcatatgattattcatacttttgaagaattggaggcttctttagtttctgagataaaatctattttcccaaatgtttataccattggtccacttcaattgttgttaaacaagattacacaaaaagaaacaaacaatgattcttatagtctttggaaagaagaaccagaatgcgtggaatggttgaactccaaagaaccaaatagtgttgtctatgtaaatttcggttcattggcagtgatgtccttgcaagatttggtcgagtttggttggggattagtaaattctaatcattattttttgtggattataagagctaatttgatcgatggtaagccagctgttatgccacaagaattgaaagaagctatgaacgagaaaggttttgttggttcctggtgttctcaagaggaagtcttgaatcatccagctgtgggcggtttccttactcattgcggttggggttctataatcgaatctctttctgctggtgttcctatgcttggatggccatctataggtgatcagagagctaactgccgtcagatgtgtaaagagtgggaagtgggtatggaaatcggtaaaaatgtcaaaagagacgaagttgagaaattggtgagaatgttgatggaaggactggaaggtgaaagaatgagaaaaaaagctttggaatggaagaaatcagctactttggctacttgctgcaacggttcttcctcattggacgtagaaaaattggcaaatgagattaaaaaattgtccagaaactaa

SEQ ID NO: 93 - DNA, 1362 bp, Artificial Sequence
  Synthetic
atggacgcgcaacgcggacatacgactaccatcctgatgtttccgtggttggggtacggccaccttagtgcattcctcgaattagccaagagcttgtcgcgtaggaactttcatatttatttctgttccacatctgtcaatttagatgctataaaacccaaactaccatcatcttcaagttccgattctattcagcttgtagagttatgcttgccttcctcgccagaccaactacccccacacctgcatacaactaatgctctacctccacatctaatgcctaccctgcaccaggccttttcaatggcagctcaacattttgcagctatattacatactttagcaccgcacttgttaatctatgattcgttccagccttgggcgccacaattggccagctctcttaacattcctgctattaattttaataccacgggtgccagtgtgctaacaagaatgttacacgcgactcattacccatcttcaaagttcccaatctccgaatttgttttacatgattattggaaagcaatgtattcagcagctggtggtgctgttacaaaaaaggaccataaaataggagaaaccttggcaaactgtttacacgcttcttgctcggtaattctgatcaattcattcagagagttggaagaaaaatacatggattacttgtctgtcttactaaacaagaaagttgtgcccgtgggtccgcttgtttatgagccaaaccaagatggcgaagacgaaggttatagttcgataaagaattggctcgataaaaaggagccctcctcaactgtctttgtttccttcgggtccgaatattttccgtccaaagaagaaatggaagaaattgcccatggcttggaggctagcgaggtacactttatttgggtcgttagattcccacaaggagacaatacttctgcaattgaagatgcccttcctaagggttttcttgagcgagtgggcgaacgtggaatggtggttaagggttgggctcctcaggccaaaattttgaaacattggagcacaggcggtttcgtaagtcattgtggatggaatagtgttatggagagcatgatgtttggtgtacccataataggtgttccgatgcatttagatcaaccatttaatgcagggctcgcggaagaagcaggagtaggggtagaggctaaaagggaccctgatggtaagatacagagagatgaagtcgctaaactgatcaaagaagtggttgtcgaaaaaacgcgcgaagatgtcagaaagaaggctagggaaatgtctgaaattttacgttcgaaaggtgaggaaaagatggacgagatggttgcagccattagtctcttcttgaagatataa

SEQ ID NO: 94 - DNA, 1455 bp, Artificial Sequence
  Synthetic
atggaccagatggcaaaaattgatgagaagaaaccccacgttgtgtttataccattcccggcgcaaagtcatatcaagtgtatgctcaaactggcccgcattttgcatcaaaagggattatatattacatttatcaataccgatacgaaccacgaacgacttgtcgcttccgggggcactcaatggttagaaaatgctcctggtttctggtttaaaacagtacctgacggtttcggttctgcaaaagatgatggagttaagccaactgacgccttgagagaactaatggattacctaaaaactaactttttcgatctctttttggacttagtattaaagttagaggtccccgctacctgcataatttgtgatggctgcatgacattcgcgaatacgatcagagctgctgaaaaattgaatataccagttatacttttttggacaatggcagcctgtggttttatggcattttatcaggccaaagtgctgaaggaaaaagagattgttcctctgaaagacgaaacttacttgaccaacggatatttagatatggaaattgattggatcccaggtatgaaacgtattaggcttagagatctacccgagttcattctggccactaagcaaaattatttcgcatttgaatttttatttgaaacagctcaattggcggacaaagtatcgcatatgataatccataccttcgaagaattggaagctagcttagtgtcagaaatcaagtctatatttccgaacgtttacactattggacctttgcagctattgctgaataagataaccctcaaagagactaataatgactcatatagtctatggaaggaagagccagaatgtgttgagtggcttaactctaaggagccaaactccgtcgtgtacgttaacttcggttccttggctgtgatgtctttacaagatctcgtcgaatttgggtggggcttggttaattcaaatcactatttcttatggatcattagagccaatctgattgatggtaagccagctgttatgcctcaagaactcaaagaagccatgaacgagaaagggtttgtaggttcgtggtgttcgcaggaagaggtccttaatcatcctgtggtaggcggtttcttgacgcattgcggttggggaagtatcatagagagcctttcagcaggcgtgcctatgttaggatggccgagcattggggaccagagggcaaactgccggcaaatgtgtaaagaatgggaagtgggcatggagataggtaaaaatgttaagagagatgaagttgaaaaactggttcgtatgttgatggaaggtttggaaggagagcgaatgagaaaaaaggctttagagtggaaaaagtccgctacattagcaacgtgttgtaacgggtcttcatcactggacgtcgaaaaattggccaatgaaattaagaaattatcgcgtaattaataa

SEQ ID NO: 95 - DNA, 1371 bp, Artificial Sequence
  Synthetic
atggaaaaccaaccacaaactactgtgagaagacatagaagaataattttgttcccaatgccattccaaggtcatattaacccaatgatccaattggctaacttgctgtattctaacggtttctctatagttatattgcatacaaacttcaatgctccaaaattctctaattatccaaattttactttcatctctgtcttggacaacgctgagaatgaaccattctctacatcctctagtttcgaatttgctcaaaactacacatttaagcaagatggtgctgatgaactaagacataagttggaactattgttggcatccggtaacgatgaaccagtttcttgtcttattactgatgctatttggcattttactcagtctgtggctgactccttgcaaattcctagaatcgtgttgagaactacttctgtctattgttccattgtgtatgcttcaatcccactatttgatgacagaggttacttcgccttggatgattctcatctggaagaacaagtcatggagtttccattattgaaagttaaggacattaagaagattggtattaaaagtatgaatgacccatatgctaagatgatatctgaaatggtaaaacaaattaaagcatcttccggtatcatctggaatagttttaaagaattagaggaaactgaacttgattctatcccacatgattttccaatacctagattcattatcccattccataaatatttcaacgccagttcttcttctttgttggaacaagatagaactgtgtttccatggttggatcagcaagcaccaaaatctgttctatacgtatcctttggatctttgtgtcaggttgacgaaaaagaatttttggagattgcccatggtttggtttattctcaacaaccatttttgtgggttgtcagaccaggtttcgtcaaagattccacttggctagaatcacttcctctgccagatggttttccaggtgaaagaggtagagtggtgaaatgggccccacagcaagaggtactagctcatgaagctactggtgcattttggacacattccggttggaatagtactttggagtccgtttgcgaaggtgttgctatgatttgttctccattttggggtgatcagcctattgacgctagatacatgtccgatgtctccaaggtcggcgtctacttggaaaacggtttccagagagacgagatttcctccgccatccgcagagtgatggtcgatgaagatggaaaagatattagagaaagagtaaaagttctaaaacagaaagtagatgactctttaatgatttccggttcttctaatgaaagtctggaatctttgatacattacatatcatctttctaa

SEQ ID NO: 96 - DNA, 1443 bp, Artificial Sequence
  Synthetic
atggcaaacacggagtccttaaatgaccataagcaactgcacgtggccatgtttccgtggctagctttcggtcatatcattccctttttggaactttcaaaattcattgcggaaaaaggccataaagtcagttttttgtcgaccacacgtaatatacagagattacctactatcccatctaacctcagcccattgattaatttagttaagctcactttacctcgagttcaagaactaccagaggatgctgaagcaacaatagatgtacacacccaagacgtccaccatcttaagaaagcattcgatggactacagcctgaggtaacaagatttctggaaaaagaatctcctgattggataatttatgattttgccccatactggttgccctcagttgctgcggggcttaggatttcgcgcgcattctattccaactttaatgcttggttcatcgcattcttaggtgccagtgccgacgatttgatttctggttctggatacgaccatagaacgagggtagaaaactttatgactccgcccaagtgggtgccttttccaactaatgtttgttatagaaaatacgaagctgtcagaatggtgggcaatacctcagctaatgctagtggtatatcatctgtgtatcgtgtaggcatgatcctgaagggtagcgattgcatgtttatcagacattcttacgagttcgaaccacaatggttgacgttattggaaaagttacatcaccttcctgttgttccagtcggtttgctgcctccagaaaaaccgacaaacattgaagatggaaatgacgagacttgggatacagttaaaatgtggttagatggccaacagaaaggccacgtagtgtatgttgcgtttggttccgaagtgacgctctcgcgtagtgagcttgccgaattggcgttaggtctagagttatccgggttaccgtttttttgggcattgaggaaacccgttgcatcaaccgaatctaaattggttgaactcccagatggattcttagatcgcactagcgacagaggtttagtatggacttcttgggctcctcaactacaaatattatctcatgagagtgtgggaggatttcttacacattgtggatggagctcaatcgtcgaagctatgatgttcggtcaccccctaattatgttaccatgcctagcagaccaggggcttaacgctcgggtaatggttgataagaaagtgggcatagagattccgagaaatggtgaggacgggagctttaacaaggaatcagtcgcgaggtcggtaagggctgttgtcgccgatgatgaaggtaaaatttataaggaaaatgctatggaattgtcccgacttttcggggatacaaagatgggtaaaaaatacattaatcactttattgactatctagagaagactagaagaacccttaccgtgtagtaa

SEQ ID NO: 97 - protein, 466 aa, Stevia rebaudiana
MLLQSNPMENETETTVSRRRRILLFPVPFQGHINPMLQLANVLYSKGFSITIFHTNFNSPKTSNYPHFTFRFILDNDPQDKRISNLPTHGPAASIRIPFFNEYRADELRRELELLMLASEEDGEVSCLIADQIWYFTQSVADSLNLRRLVLVTSSLFNFHAHVSLPQFDELGYLDPDDKTRLEEQASGFPMLKVKDIKCSFSMWKKYKEYFENITKQTKASSGVIWNSFKELEESELETVIREIPAPSFLIPLPKHLTASSSSLLDHDRTVFPWLDQQPSRSVLYVSFGSGTEVLDEKDFLEIARGLVDSKQSFLWVVRPGFVKGSTWVEPLPDGFLGERGRIVKWVPQQEVLAHGAIGAFWTHSGWNSTLESVCEGVPMIFSDFGLDQPLNARYMSDVLKVGVYLENGWERGEIANAIRRVMVDEEGEYIRQNARVLKQKADVSLMKGGSSYESLESLVSYISSL

SEQ ID NO: 98 - protein, 447 aa, Stevia rebaudiana
MEEHGGRRRPLVVLTSCPFHGHMIPTLQLATTLHAKGFTIAIAHSKLNPPNPSNHPSDFIFLPLSDDIPAIDNSGSFTDFIRKLNNNCKPSFKEHLTRLISEGNKSIVVVYDNVLHFAGIVAVDLNLAAVMFRSSSAAYFPAFLARQQLSQRGRFLEEDFKMDEMVPNHYPMRYKDLPFSKSPIEDWRQLYSNFSQQAHPSAVIWNTIKFLEHESLTQVHNYYQVPVFAVGPLHKMTPTSYIGSHEEDNGCITWLDKQPPKSVVYISFGSLATMEAKILTEMAFGLAKSNQRFLWAVRPGLISGSGWVEFLPEGFVEETRGRGLIVKWAPQKEVLAHFAVGGFWSHCGWNSCLESISSGVVMMCQPFIADQGVNARYVSYVWKIGLELERVERGEIERMIKRVMVDDEGEEMRVRVNDMKKMVKEALEIGGSSQESFEGLVEFLLSC

SEQ ID NO: 99 - protein, 474 aa, Stevia rebaudiana
MVQPRVLLFPFPALGHVKPFLSLAELLSDAGIDVVFLSTEYNHRRISNTEALASRFPTLHFETIPDGLPPNESRALADGPLYFSMREGTKPRFRQLIQSLNDGRWPITCIITDIMLSSPIEVAEEFGIPVIAFCPCSARYLSIHFFIPKLVEEGQIPYADDDPIGEIQGVPLFEGLLRRNHLPGSWSDKSADISFSHGLINQTLAAGRASALILNTFDELEAPFLTHLSSIFNKIYTIGPLHALSKSRLGDSSSSASALSGFWKEDRACMSWLDCQPPRSVVFVSFGSTMKMKADELREFWYGLVSSGKPFLCVLRSDVVSGGEAAELIEQMAEEEGAGGKLGMVVEWAAQEKVLSHPAVGGFLTHCGWNSTVESIAAGVPMMCWPILGDQPSNATWIDRVWKIGVERNNREWDRLTVEKMVRALMEGQKRVEIQRSMEKLSKLANEKVVRGGLSFDNLEVLVEDIKKLKPYKF

SEQ ID NO: 100 - protein, 485 aa, Siraitia grosvenorii
MAEQAHDLLHVLLFPFPAEGHIKPFLCLAELLCNAGFHVTFLNTDYNHRRLHNLHLLAARFPSLHFESISDGLPPDQPRDILDPKFFISICQVTKPLFRELLLSYKRISSVQTGRPPITCVITDVIFRFPIDVAEELDIPVFSFCTFSARFMFLYFWIPKLIEDGQLPYPNGNINQKLYGVAPEAEGLLRCKDLPGHWAFADELKDDQLNFVDQTTASSRSSGLILNTFDDLEAPFLGRLSTIFKKIYAVGPIHSLLNSHHCGLWKEDHSCLAWLDSRAAKSVVFVSFGSLVKITSRQLMEFWHGLLNSGKSFLFVLRSDVVEGDDEKQVVKEIYETKAEGKWLVVGWAPQEKVLAHEAVGGFLTHSGWNSILESIAAGVPMISCPKIGDQSSNCTWISKVWKIGLEMEDRYDRVSVETMVRSIMEQEGEKMQKTIAELAKQAKYKVSKDGTSYQNLECLIQDIKKLNQIEGFINNPNFSDLLRV

SEQ ID NO: 101 - protein, 491 aa, Artificial Sequence
  Synthetic
MVAPPTNLHFVLFPLMAQGHLVPMVDIARILAQRGATVTIITTPYHANRVRPVISRAIATNLKIQLLELQLRSTEAGLPEGCESFDQLPSFEYWKNISTAIDLLQQPAEDLLRELSPPPDCIISDFLFPWTTDVARRLNIPRLVFNGPGCFYLLCIHVAITSNILGENEPVSSNTERVVLPGLPDRIEVTKLQIVGSSRPANVDEMGSWLRAVEAEKASFGIVVNTFEELEPEYVEEYKTVKDKKMWCIGPVSLCNKTGPDLAERGNKAAITEHNCLKWLDERKLGSVLYVCLGSLARISAAQAIELGLGLESINRPFIWCVRNETDELKTWFLDGFEERVRDRGLIVHGWAPQVLILSHPTIGGFLTHCGWNSTIESITAGVPMITWPFFADQFLNEAFIVEVLKIGVRIGVERACLFGEEDKVGVLVKKEDVKKAVECLMDEDEDGDQRRKRVIELAKMAKIAMAEGGSSYENVSSLIRDVTETVRAPH

SEQ ID NO: 102 - protein, 495 aa, Stevia rebaudiana
MVSETTKSSPLHFVLFPFMAQGHMIPMVDIARLLAQRGVIITIVTTPHNAARFKNVLNRAIESGLPINLVQVKFPYLEAGLQEGQENIDSLDTMERMIPFFKAVNFLEEPVQKLIEEMNPRPSCLISDFCLPYTSKIAKKFNIPKILFHGMGCFCLLCMHVLRKNREILDNLKSDKELFTVPDFPDRVEFTRTQVPVETYVPAGDWKDIFDGMVEANETSYGVIVNSFQELEPAYAKDYKEVRSGKAWTIGPVSLCNKVGADKAERGNKSDIDQDECLKWLDSKKHGSVLYVCLGSICNLPLSQLKELGLGLEESQRPFIWVIRGWEKYKELVEWFSESGFEDRIQDRGLLIKGWSPQMLILSHPSVGGFLTHCGWNSTLEGITAGLPLLTWPLFADQFCNEKLVVEVLKAGVRSGVEQPMKWGEEEKIGVLVDKEGVKKAVEELMGESDDAKERRRRAKELGDSAHKAVEEGGSSHSNISFLLQDIMELAEPNN

SEQ ID NO: 103 - protein, 495 aa, Stevia rebaudiana
MAFEKNNEPFPLHFVLFPFMAQGHMIPMVDIARLLAQRGVLITIVTTPHNAARFKNVLNRAIESGLPINLVQVKFPYQEAGLQEGQENMDLLTTMEQITSFFKAVNLLKEPVQNLIEEMSPRPSCLISDMCLSYTSEIAKKFKIPKILFHGMGCFCLLCVNVLRKNREILDNLKSDKEYFIVPYFPDRVEFTRPQVPVETYVPAGWKEILEDMVEADKTSYGVIVNSFQELEPAYAKDFKEARSGKAWTIGPVSLCNKVGVDKAERGNKSDIDQDECLEWLDSKEPGSVLYVCLGSICNLPLSQLLELGLGLEESQRPFIWVIRGWEKYKELVEWFSESGFEDRIQDRGLLIKGWSPQMLILSHPSVGGFLTHCGWNSTLEGITAGLPMLTWPLFADQFCNEKLVVQILKVGVSAEVKEVMKWGEEEKIGVLVDKEGVKKAVEELMGESDDAKERRRRAKELGESAHKAVEEGGSSHSNITFLLQDIMQLAQSNN

SEQ ID NO: 104 - protein, 532 aa, Siraitia grosvenorii
MLMHALTPTAPFFSIKPNTEPPSATTRQPPMDSPPQKPHFLLFPFMAQGHMIPMIDLAKLLAQRGAIITVVTTPHNAARYHSVLARAIDSGLHIHVLQLQFPCNEGGLPEGCENFDLLPSLGSASTFFRATFLLYEPSEKVFEELIPRPTCIISDMCLPWTVRLAQKYHVPRLVFYSLSCFFLLCMRSLKNNQALISSKSDSELVTFSDLPDPVEFLKSQLPKSNDEEMAKFGYEIGEADRQSHGVIVNVFEEMEPKYLAEYRKERESPEKVWCVGPVSLCNDNKLDKAQRGNKASIDERECIEWLDGQQPSSVVYVSLGSLCNLVTAQLIELGLGLEASNKPFIWVIRKGNITEELQKWLVEYDFEEKTKGRGLVILGWAPQVLILSHPAIGCFLTHCGWNSSIEGISAGMPMITWPLFADQVFNEKLIVEILRIGVSVGMETAMHWGEEEEKGVVVKREKVREAIERAMDGDEREERRERCKELAEMAKRAVEEGGSSHRNLTLLTEDILVNGGGQERMDDADDFPTIVN

SEQ ID NO: 105 - protein, 469 aa, Stevia rebaudiana
MEQAHDLLHVLLFPYPAKGHIKPFLCLAELLCNAGLNVTFLNTDYNHRRLHNLHLLAACFPSLHFESISDGLQPDQPRDILDPKFYISICQVTKPLFRELLLSYKRTSSVQTGRPPITCVITDVIFRFPIDVAEELDIPVFSFCTFSARFMFLYFWIPKLIEDGQLPYPNGNINQKLYGVAPEAEGLLRCKDLPGHWAFADELKDDQLNFVDQTTASLRSSGLILNTFDDLEAPFLGRLSTIFKKIYAVGPIHALLNSHHCGLWKEDHSCLAWLDSRAARSVVFVSFGSLVKITSRQLMEFWHGLLNSGTSFLFVLRSDVVEGDGEKQVVKEIYETKAEGKWLVVGWAPQEKVLAHEAVGGFLTHSGWNSILESIAAGVPMISCPKIGDQSSNCTWISKVWKIGLEMEDQYDRATVEAMVRSIMKHEGEKIQKTIAELAKRAKYKVSKDGTSYRNLEILIEDIKKIKPN

SEQ ID NO: 106 - protein, 458 aa, Stevia rebaudiana
MENKTETTVRRRRRIILFPVPFQGHINPILQLANVLYSKGFSITIFHTNFNKPKTSNYPHFTFRFILDNDPQDERISNLPTHGPLAGMRIPIINEHGADELRRELELLMLASEEDEEVSCLITDALWYFAQSVADSLNLRRLVLMTSSLFNFHAHVSLPQFDELGYLDPDDKTRLEEQASGFPMLKVKDIKSAYSNWQILKEILGKMIKQTKASSGVIWNSFKELEESELETVIREIPAPSFLIPLPKHLTASSSSLLDHDRTVFQWLDQQPPSSVLYVSFGSTSEVDEKDFLEIARGLVDSKQSFLWVVRPGFVKGSTWVEPLPDGFLGERGRIVKWVPQQEVLAHGAIGAFWTHSGWNSTLESVCEGVPMIFSDFGLDQPLNARYMSDVLKVGVYLENGWERGEIANAIRRVMVDEEGEYIRQNARVLKQKADVSLMKGGSSYESLESLVSYISSL

SEQ ID NO: 107 - protein, 458 aa, Stevia rebaudiana
MENKTETTVRRRRRIILFPVPFQGHINPILQLANVLYSKGFSITIFHTNFNKPKTSNYPHFTFRFILDNDPQDERISNLPTHGPLAGMRIPIINEHGADELRRELELLMLASEEDEEVSCLITDALWYFAQSVADSLNLRRLVLMTSSLFNFHAHVSLPQFDELGYLDPDDKTRLEEQASGFPMLKVKDIKSAYSNWQILKEILGKMIKQTRASSGVIWNSFKELEESELETVIREIPAPSFLIPLPKHLTASSSSLLDHDRTVFQWLDQQPPSSVLYVSFGSTSEVDEKDFLEIARGLVDSKQSFLWVVRPGFVKGSTWVEPLPDGFLGERGRIVKWVPQQEVLAHGAIGAFWTHSGWNSTLESVCEGVPMIFSDFGLDQPLNARYMSDVLKVGVYLENGWERGEIANAIRRVMVDEEGEYIRQNARVLKQKADVSLMKGGSSYESLESLVSYISSL

SEQ ID NO: 108 - protein, 483 aa, Stevia rebaudiana
MDQMAKIDEKKPHVVFIPFPAQSHIKCMLKLARILHQKGLYITFINTDTNHERLVASGGTQWLENAPGFWFKTVPDGFGSAKDDGVKPTDALRELMDYLKTNFFDLFLDLVLKLEVPATCIICDGCMTFANTIRAAEKLNIPVILFWTMAACGFMAFYQAKVLKEKEIVPVKDETYLTNGYLDMEIDWIPGMKRIRLRDLPEFILATKQNYFAFEFLFETAQLADKVSHMIIHTFEELEASLVSEIKSIFPNVYTIGPLQLLLNKITQKETNNDSYSLWKEEPECVEWLNSKEPNSVVYVNFGSLAVMSLQDLVEFGWGLVNSNHYFLWIIRANLIDGKPAVMPQELKEAMNEKGFVGSWCSQEEVLNHPAVGGFLTHCGWGSIIESLSAGVPMLGWPSIGDQRANCRQMCKEWEVGMEIGKNVKRDEVEKLVRMLMEGLEGERMRKKALEWKKSATLATCCNGSSSLDVEKLANEIKKLSRN

SEQ ID NO: 109 - protein, 453 aa, Siraitia grosvenorii
MDAQRGHTTTILMFPWLGYGHLSAFLELAKSLSRRNFHIYFCSTSVNLDAIKPKLPSSSSSDSIQLVELCLPSSPDQLPPHLHTTNALPPHLMPTLHQAFSMAAQHFAAILHTLAPHLLIYDSFQPWAPQLASSLNIPAINFNTTGASVLTRMLHATHYPSSKFPISEFVLHDYWKAMYSAAGGAVTKKDHKIGETLANCLHASCSVILINSFRELEEKYMDYLSVLLNKKVVPVGPLVYEPNQDGEDEGYSSIKNWLDKKEPSSTVFVSFGSEYFPSKEEMEEIAHGLEASEVHFIWVVRFPQGDNTSAIEDALPKGFLERVGERGMVVKGWAPQAKILKHWSTGGFVSHCGWNSVMESMMFGVPIIGVPMHLDQPFNAGLAEEAGVGVEAKRDPDGKIQRDEVAKLIKEVVVEKTREDVRKKAREMSEILRSKGEEKMDEMVAAISLFLKI

SEQ ID NO: 110 - protein, 483 aa, Stevia rebaudiana
MDQMAKIDEKKPHVVFIPFPAQSHIKCMLKLARILHQKGLYITFINTDTNHERLVASGGTQWLENAPGFWFKTVPDGFGSAKDDGVKPTDALRELMDYLKTNFFDLFLDLVLKLEVPATCIICDGCMTFANTIRAAEKLNIPVILFWTMAACGFMAFYQAKVLKEKEIVPLKDETYLTNGYLDMEIDWIPGMKRIRLRDLPEFILATKQNYFAFEFLFETAQLADKVSHMIIHTFEELEASLVSEIKSIFPNVYTIGPLQLLLNKITLKETNNDSYSLWKEEPECVEWLNSKEPNSVVYVNFGSLAVMSLQDLVEFGWGLVNSNHYFLWIIRANLIDGKPAVMPQELKEAMNEKGFVGSWCSQEEVLNHPVVGGFLTHCGWGSIIESLSAGVPMLGWPSIGDQRANCRQMCKEWEVGMEIGKNVKRDEVEKLVRMLMEGLEGERMRKKALEWKKSATLATCCNGSSSLDVEKLANEIKKLSRN

SEQ ID NO: 111 - protein, 456 aa, Stevia rebaudiana
MENQPQTTVRRHRRIILFPMPFQGHINPMIQLANLLYSNGFSIVILHTNFNAPKFSNYPNFTFISVLDNAENEPFSTSSSFEFAQNYTFKQDGADELRHKLELLLASGNDEPVSCLITDAIWHFTQSVADSLQIPRIVLRTTSVYCSIVYASIPLFDDRGYFALDDSHLEEQVMEFPLLKVKDIKKIGIKSMNDPYAKMISEMVKQIKASSGIIWNSFKELEETELDSIPHDFPIPRFIIPFHKYFNASSSSLLEQDRTVFPWLDQQAPKSVLYVSFGSLCQVDEKEFLEIAHGLVYSQQPFLWVVRPGFVKDSTWLESLPLPDGFPGERGRVVKWAPQQEVLAHEATGAFWTHSGWNSTLESVCEGVAMICSPFWGDQPIDARYMSDVSKVGVYLENGFQRDEISSAIRRVMVDEDGKDIRERVKVLKQKVDDSLMISGSSNESLESLIHYISSF

SEQ ID NO: 112 - protein, 479 aa, Stevia rebaudiana
MANTESLNDHKQLHVAMFPWLAFGHIIPFLELSKFIAEKGHKVSFLSTTRNIQRLPTIPSNLSPLINLVKLTLPRVQELPEDAEATIDVHTQDVHHLKKAFDGLQPEVTRFLEKESPDWIIYDFAPYWLPSVAAGLRISRAFYSNFNAWFIAFLGASADDLISGSGYDHRTRVENFMTPPKWVPFPTNVCYRKYEAVRMVGNTSANASGISSVYRVGMILKGSDCMFIRHSYEFEPQWLTLLEKLHHLPVVPVGLLPPEKPTNIEDGNDETWDTVKMWLDGQQKGHVVYVAFGSEVTLSRSELAELALGLELSGLPFFWALRKPVASTESKLVELPDGFLDRTSDRGLVWTSWAPQLQILSHESVGGFLTHCGWSSIVEAMMFGHPLIMLPCLADQGLNARVMVDKKVGIEIPRNGEDGSFNKESVARSVRAVVADDEGKIYKENAMELSRLFGDTKMGKKYINHFIDYLEKTRRTLTV

SEQ ID NO: 113 - DNA, 1563 bp, Artificial Sequence
  Synthetic
atggaaatgtcctcaagtgtcgcagccacaatcagtatctggatggtcgtcgtatgtatcgtaggtgtaggttggagagtcgtaaattgggtttggttgctgccaaagaaattggaaaagagattgagagaacaaggtttggccggtaattcttacagattgttgttcggtgacttgaaggaaagagctgcaatggaagaacaagcaaattcaaagcctataaacttctcccatgacatcggtccaagagttttcccttcaatgtacaagaccatccaaaactacggtaaaaactcctacatgtggttaggtccataccctagagtccacatcatggatccacaacaattgaagaccgtttttactttggtctacgacattcaaaagccaaatttgaaccctttgattaaattcttgttagatggtatcgttacacatgaaggtgaaaagtgggctaagcacagaaagattattaacccagcattccatttggaaaagttgaaggatatgatacctgctttctttcactcatgtaatgaaatcgtcaacgaatgggaaagattgatttcaaaagaaggttcctgcgaattggatgtaatgccttatttgcaaaatttggccgctgacgccatttcaagaaccgcttttggttcttcatacgaagaaggtaaaatgatcttccaattgttgaaggaattgactgatttggttgtcaaggtagcttttggtgtttatattccaggttggagattcttgcctacaaagagtaacaacaaaatgaaggaaattaatagaaaaatcaagtctttgttgttgggtatcattaacaagagacaaaaggcaatggaagaaggtgaagccggtcaatctgatttgttgggtatattaatggaaagtaattctaacgaaatccaaggtgaaggtaataacaaggaagatggcatgtctattgaagacgtcatcgaagagtgtaaggtattttatataggtggtcaagaaactacagcaagattattgatctggactatgatattgttgtccagtcatacagaatggcaagaaagagccagaaccgaagtcttgaaggtatttggtaataagaaaccagatttcgacggtttgtcaagattgaaggtagttactatgatcttgaacgaagttttaagattgtacccacctgcttccatgttgacaagaatcatccaaaaggaaacaagagttggtaaattaaccttgccagcaggtgttatcttgataatgcctatcatcttgatacatagagatcacgacttgtggggtgaagatgctaacgagtttaaaccagaaagattcagtaaaggtgtttctaaggcagccaaagtccaaccagcctttttcccttttggttggggtcctagaatttgcatgggtcaaaacttcgctatgatcgaagctaagatggcattgagtttgatcttgcaaagattttctttcgaattgtcttcatcctacgttcatgcaccaactgtcgtcttcactacacaaccacaacacggtgcccacatcgttttgagaaagttataa

SEQ ID NO: 114 - DNA, 1422 bp, Artificial Sequence
  Synthetic
atgtggactgtcgtgctcggtttggcgacgctgtttgtcgcctactacatccattggattaacaaatggagagattccaagttcaacggagttctgccgccgggcaccatgggtttgccgctcatcggagagacgattcaactgagtcgacccagtgactccctcgacgttcaccctttcatccagaaaaaagttgaaagatacgggccgatcttcaaaacatgtctggccggaaggccggtggtggtgtcggcggacgcagagttcaacaactacataatgctgcaggaaggaagagcagtggaaatgtggtatttggatacgctctccaaatttttcggcctcgacaccgagtggctcaaagctctgggcctcatccacaagtacatcagaagcattactctcaatcacttcggcgccgaggccctgcgggagagatttcttccttttattgaagcatcctccatggaagcccttcactcctggtctactcaacctagcgtcgaagtcaaaaatgcctccgctctcatggtttttaggacctcggtgaataagatgttcggtgaggatgcgaagaagctatcgggaaatatccctgggaagttcacgaagcttctaggaggatttctcagtttaccactgaattttcccggcaccacctaccacaaatgcttgaaggatatgaaggaaatccagaagaagctaagagaggttgtagacgatagattggctaatgtgggccctgatgtggaagatttcttggggcaagcccttaaagataaggaatcagagaagttcatttcagaggagttcatcatccaactgttgttttctatcagttttgctagctttgagtccatctccaccactcttactttgattctcaagctccttgatgaacacccagaagtagtgaaagagttggaagctgaacacgaggcgattcgaaaagctagagcagatccagatggaccaattacttgggaagaatacaaatccatgacttttacattacaagtcatcaatgaaaccctaaggttggggagtgtcacacctgccttgttgaggaaaacagttaaagatcttcaagtaaaaggatacataatcccggaaggatggacaataatgcttgtcaccgcttcacgtcacagagacccaaaagtctataaggaccctcatatcttcaatccatggcgttggaaggacttggactcaattaccatccaaaagaacttcatgccttttgggggaggcttaaggcattgtgctggtgctgagtactctaaagtctacttgtgcaccttcttgcacatcctctgtaccaaataccgatggaccaaacttgggggaggaaggattgcaagagctcatatattgagttttgaagatgggttacatgtgaagttcacacccaaggaatga

SEQ ID NO: 115 - DNA, 2106 bp, Artificial Sequence
  Synthetic
atgaaggtgtcgccttttgagttcatgagtgccataattaaaggcagaatggacccgagcaattcatcttttgaatccacaggagaagtagcatctgtcatctttgagaaccgagaattggttgcgattttaaccacgtcaatagctgttatgattgggtgtttcgtggttcttatgtggcgtagggctggttccagaaaagtcaagaatgtcgaactacccaaaccactgatcgttcacgaaccagagcctgaagtagaagatggtaagaaaaaggtaagcatcttctttggtactcagacaggaactgccgagggcttcgcaaaagctttggcagatgaagctaaggcgcgctatgaaaaagccacttttagagttgtcgacctcgatgattacgcggctgacgatgaccaatatgaagagaaattaaaaaacgagtctttcgcagtatttctattggcaacatacggtgatggtgaaccaaccgataatgctgcaaggttctataagtggtttgccgaagggaaagagcgtggcgaatggttacaaaacttacattacgctgtttttggattgggtaatcggcagtatgaacattttaataaaattgcaaaggtggccgatgagcttttagaagctcaaggtgggaacagactcgtaaaagttggcctgggggatgacgatcaatgcatagaagacgatttctcagcttggagagaaagtttgtggcccgaacttgacatgctcttaagagatgaagatgatgctacaactgttacgaccccttacactgctgccgtcttggagtatcgagtggtgttccacgatagcgcagatgtcgctgcggaggacaagtcttggattaatgccaacggtcatgctgttcacgacgctcaacatcctttccgctctaatgtagttgtgagaaaagaactgcatacatccgcctctgatagaagttgttcgcatttagaatttaacatatcaggctctgcactaaattatgagactggagatcatgtaggtgtttactgcgaaaaccttacagaaaccgtagatgaagcattgaatttgctaggtctttccccggaaacctatttttcaatctatactgataacgaggacggaacaccactaggaggttcctcactaccccctccatttcccagctgtacgctaaggacggcattaacaaggtacgcggacttgttgaatagtccaaagaagagtgcacttctggctttagccgctcacgcatccaatccagttgaagcggatcgtttaagatacctcgcttccccagcagggaaagatgaatatgcccaatctgtgattggtagccagaaaagtttactcgaggtcatggcagagtttccctcagcgaagcctcctttgggcgttttctttgctgcggttgcacctcgactccaaccgcgtttctacagtatttcctctagtccacggatggcaccatctcgtatccatgttacttgtgcgttggtgtacgataagatgccgactggccgcatacacaaaggtgtctgctcaacttggatgaagaatagtgtaccaatggaaaaatctcatgagtgttcgtgggcaccaatattcgttaggcaatcaaattttaagcttccagctgaatccaaagtcccaattatcatggttggccctgggaccggtctagcaccttttagaggatttctacaagaaagactagccttaaaggaatctggtgtggaattgggcccgtctattcttttcttcggatgcagaaacagaagaatggattatatttatgaagatgagttaaacaattttgttgaaacaggggctctttcagaattagtaattgccttttcaagggaaggtcctaccaaagaatacgttcagcataaaatggccgagaaagcttcagacatctggaatttgatcagtgaaggtgcttatttgtacgtatgtggcgatgctaaaggtatggctaaggatgtgcataggacgcttcacactataatgcaagaacagggtagtttagacagttcgaaggccgaatctatggtgaagaacttgcaaatgaatggtagatatttgcgtgatgtgtggtaa

SEQ ID NO: 116 - DNA, 2079 bp, Artificial Sequence
  Synthetic
atgacctctgcattgtatgcttctgatcttttcaaacaattaaagagtataatgggtactgactccttgtctgatgatgtagttttggtaatagctactacatctttagctctagtcgctggttttgtggtcttgctttggaagaagactactgctgatagatccggtgaattgaaacctctgatgattcctaaatctttgatggctaaagatgaagacgatgatttggacctgggctctggtaagacaagagtttctattttttttggtactcaaactggtactgccgagggttttgctaaggctttgtctgaggaaattaaagctagatatgaaaaggccgcagttaaggtgattgatttggatgactatgctgctgatgatgatcaatacgaagaaaaattgaagaaagaaactttggcattcttctgtgtggctacttacggtgatggtgaaccaactgacaacgctgctagattttataaatggttcactgaggaaaatgaaagagatattaagttacaacaattggcttatggtgtttttgccctaggaaatagacaatacgagcattttaataaaatcggtatcgttttggacgaggaactatgtaagaaaggtgctaaaagattaattgaagttggtttaggtgatgacgatcaatcaattgaagatgactttaacgcttggaaagagtctttgtggtctgagttggataaactgttgaaggatgaagatgacaaatcagtagcaacaccatatactgctgttataccagaatatagagttgttactcatgatccaagatttactactcagaaatctatggagtctaatgttgctaacggtaatactactattgatattcatcatccatgcagagtagacgttgccgttcaaaaagaattgcatacccatgagtccgatagatcttgtatccatcttgagttcgatatttctaggactggtattacctatgaaactggtgaccatgtgggtgtttatgcagaaaatcatgtcgaaatagttgaagaagctggtaagttgttgggtcattccttggacctggtcttttctatccatgctgacaaagaagatggaagtccattggaatctgctgtccctccaccatttccaggaccatgcactttgggtactggtttggctagatatgcagacttgttgaatccaccaagaaaatcagcattggttgctctggctgcttatgcaaccgagcctagtgaagctgaaaaattgaagcatcttacttctccagatggtaaagatgaatactctcaatggattgttgcttctcaaagaagtttattagaagtaatggcagcatttccatctgctaaaccaccattaggtgttttctttgctgctatcgctccaagattacagccaagatattattcaatatcttcttcaccaagattggctccatctagggttcatgtcacttctgctctagtttacggtccaacaccaactggtagaatccataagggtgtttgttccacttggatgaagaatgctgttccagcagagaaatctcatgaatgctctggtgctccaatttttataagagcttctaactttaaattaccatctaatccatctactccaatagtaatggtaggaccaggtactggtttagcaccatttagaggtttccttcaagaaagaatggctttaaaagaggacggtgaagaactgggttcttctctgttattctttggttgtagaaatagacaaatggactttatttacgaagatgaattgaataattttgttgatcagggagtaatttccgagttgataatggctttttctagggaaggtgctcaaaaagagtacgtccaacataaaatgatggaaaaagctgctcaggtatgggatttaattaaagaagaaggttatttgtatgtatgcggtgacgctaaaggtatggcaagagatgtacatagaactttgcatactatagtgcaagaacaagaaggtgtgtcttctagtgaagctgaggccattgttaagaaactacaaactgaaggtagatatctgagagatgtatggtaa

SEQ ID NO: 117 - DNA, 951 bp, Artificial Sequence
  Synthetic
atggatgaaatcgaacatattaccatcaatacaaatggaatcaaaatgcatattgcgtcagtcggcacaggaccagttgttctcttgctacacggctttccagaattatggtactcttggagacaccaactactttacctgtcctccgttgggtacagagcaatagctccagatttgagaggctatggcgatactgacagtccagctagtcctacctcttatactgctcttcatattgtaggtgacctggtcggcgcattagacgaattgggaatagaaaaggtctttttagtgggtcatgactggggtgctattatcgcatggtacttttgtttgtttagaccagatagaattaaagcacttgtgaatttgtctgtccagtttatcccacgtaacccagcaataccttttatagaaggtttcagaacagcttttggtgatgacttctacatttgtagatttcaagtacctggggaagctgaagaggatttcgcgtctatcgatactgctcaattgtttaaaacttcattatgcaatagaagctcagcccctccttgtttgcctaaagagattggttttagggctatcccaccaccagaaaatctgccatcttggctcacagaggaagatatcaacttctacgcagccaagtttaaacaaactggttttactggtgcccttaactattatagagcattcgacttgacatgggaattaacagccccatggacaggagcccagatccaagttcctgtaaagttcatagttggtgattcagatctcacgtaccatttccctggtgctaaggaatacatccacaacggagggtttaaaagagatgtgccactattagaggaagttgttgtggtaaaagatgcctgccacttcattaaccaagagcgaccacaagagattaatgctcatattcatgacttcatcaataagttctaa

SEQ ID NO: 118 - DNA, 1016 bp, Artificial Sequence
  Synthetic
atgaaagtaagaatttttgaaaattcgaattcagacgcgattgaacatagaaccgtaagtgttaatggtatcaatatgcatgtggcagaaaagggagagggacctgtcgtgttgttgcttcatggtttcccagaattgtggtacagttggagacatcaaatattggctctttcctctttaggttacagagctgtcgcaccagacttacgaggctacggggatacagatgccccagggtcaatttcatcatacacatgctttcacatcgtaggagatctcgtggctctagttgagtctctgggtatggacagggtttttgttgtagcccacgattggggtgccatgatcgcttggtgtttgtgtctgtttagacctgaaatggttaaagcttttgtttgtctctccgtcccattcagacagagaaaccctaagatgaaaccagttcaaagtatgagagcctttttcggcgatgattactatatttgcagatttcaaaatcctggggaaatcgaagaggagatggctcaagtgggtgcaagggaagtcttaagaggaattctaacatctcgtcgtcctggaccaccaatcttaccaaaagggcaagcttttagagcaagaccaggagcatccactgcattgccatcttggctatctgaaaaagatctgtcatttttcgcttctaagtatgatcaaaagggctttacaggcccactaaactactacagagccatggatcttaattgggaattgactgcgtcatggactggtgtccaagttaaagtacctgtcaaatacatcgtgggtgacgttgacatggtttttacgactcctggtgtaaaggaatatgtcaacggcggtggtttcaaaaaggacgttccatttttacaggaagtggtaatcatggaaggcgttggtcatttcattaatcaggaaaaacctgaggagatttcatctcatatacacgatttcataagcaaattcgagctcttaattaacaattcttcgccagaggttaa

SEQ ID NO: 119 - DNA, 951 bp, Artificial Sequence
  Synthetic
atggaccagatcgaacacattacgataaataccaacggaattaagatgcatatagcgagtgtgggtacagggccagtcgttcttctactgcatggtttccctgagttgtggtactcctggagacatcaactcttatatttgtcttcggttggatatcgcgctattgcaccggatttaaggggctacggtgatactgactcacccgccagccctacttcttatacagctttacacatcgtaggcgatctggtaggtgcattggatgaactaggaatagaaaaagtttttctagtgggtcatgactggggcgccattattgcttggtatttttgccttttccgtccagatagaatcaaagcgttagttaatttgtccgtccaatttattccacgaaaccctgcaatccccttcattgaagggtttagaacagccttcggtgacgatttttacatgtgtagatttcaagtcccaggcgaggctgaagaggattttgcctctatagatactgctcagctgttcaagaccagtctttgtaataggtcatcggctcctccatgtttgcccaaagaaatcggtttccgggcaattccaccgcctgaaaacttaccaagctggttgaccgaggaagacattaactactatgcagcgaagtttaaacaaacgggtttcactggtgctctcaattattaccgtgcatttgatttaacatgggagttaacagccccctggactggtgctcagatacaagtgccggttaagttcatagtaggggattcagacttgacatatcattttccaggagccaaagaatatatacacaatggaggttttaaaaaagatgtacctcttttggaagaagtagttgtggtgaaggatgcatgccatttcatcaaccaagaaaggccacaagaaattaatgctcacatccatgactttatcaataaattctaa

SEQ ID NO: 120 - DNA, 951 bp, Artificial Sequence
  Synthetic
atggaaaagattgaacacaccactatttctaccaatggtatcaacatgcatgttgcctctattggttctggtccagctgtcttgttcttgcacggtttcccagaattgtggtattcttggagacaccaattattattcttgtcttccatgggttacagagctatcgctccagacttaagaggttttggtgacaccgacgctccaccatctccatcttcttacaccgctcaccacattgtcggtgacttggtcggtttgttagaccaattgggtattgaccaagtttttttggttggtcacgactggggtgctatgatggcctggtacttttgtttgttccgtccagatagagttaaggctttggtcaatttatctgtccacttcttacgtagacacccatctatcaaatttgttgatggtttcagagccttattaggtgatgatttttacttctgtcaattccaagaaccaggtgtcgctgaagccgacttcggttctgtcgatgttgctaccatgttgaagaaattcttgaccatgagagatccaagacctccaatgattcctaaggaaaagggtttcagagccttggaaactccagatccattgccagcctggttaactgaagaagacattgactacttcgccggtaagtttcgtaagaccggttttaccggtggttttaattactacagagccttcaacttgacttgggagttgaccgctccatggtctggttctgaaatcaaggtcgctgccaagttcattgttggtgatttagacttggtttatcacttccctggtgccaaggagtatatccatggtggtggtttcaaaaaggacgtccctttgttggaggaagttgttgttgttgatggtgctgctcacttcatcaaccaagaaagaccagctgaaatttcttccttgatttacgactttatcaagaagttctaa

SEQ ID NO: 121 - DNA, 945 bp, Artificial Sequence
  Synthetic
atggagaagattgaacactctactatcgctactaatggtatcaatatgcacgttgcctctgctggttctggtccagctgttttgtttttgcacggtttcccagaattatggtattcctggagacaccaattgttgtacttgtcttctttgggttacagagctattgctccagatttgagaggtttcggtgacaccgatgctccaccatctccatcctcctacaccgcccaccacatcgttggtgatttggtcggtttgttggatcaattaggtgtcgatcaagtctttttggttggtcatgattggggtgctatgatggcctggtacttctgtttgttccgtccagacagagtcaaggccttagttaatttatctgtccacttcaccccacgtaacccagctatctctccattagatggtttccgtttgatgttgggtgatgatttctacgtttgtaagtttcaagaaccaggtgtcgctgaagccgatttcggttctgttgatactgccactatgtttaaaaagttcttgaccatgagagatccacgtccacctattattccaaacggtttcagatccttggccaccccagaagctttgccatcctggttgactgaagaggatatcgattactttgctgccaaattcgctaagactggttttactggtggtttcaactactacagagctatcgacttgacctgggagttgactgctccatggtccggttctgaaatcaaggttccaactaagtttattgttggtgacttagacttggtttaccatttcccaggtgttaaggaatacattcacggtggtggtttcaagaaggacgttccattcttggaagaagttgtcgtcatggaaggtgctgctcattttatcaaccaagaaaaagctgacgaaattaattctttgatctatgacttcattaaacaattctag

SEQ ID NO: 122 - DNA, 951 bp, Artificial Sequence
  Synthetic
atggaaaacatcgaacacaccactgtccaaactaacggtatcaagatgcacgtcgctgctattggtactggtccaccagttttgttgttgcatggtttcccagaattgtggtattcttggagacaccaattgttgtacttgtcttctgctggttacagagctatcgctccagacttgagaggttacggtgataccgacgctccaccttccccatcttcctataccgctttacacattgtcggtgatttggtcggtttgttggacgtcttgggtatcgaaaaagtcttcttaatcggtcacgactggggtgccatcatcgcctggtacttctgtttattcagacctgatagaatcaaagctttggttaacttgtctgttcaattcttcccaagaaacccaaccaccccatttgttaagggtttcagagccgtcttgggtgatcaattttacatggttagattccaagaaccaggtaaagctgaagaagaattcgcttccgttgatattagagaattcttcaagaatgttttgtccaacagagatccacaagctccatatttgccaaatgaagttaagttcgaaggtgtcccaccaccagctttggctccatggttgaccccagaagatatcgatgtctacgctgacaaattcgctgaaactggtttcactggtggtttgaactactacagagcctttgacagaacctgggaattaactgctccatggaccggtgcccgtattggtgtcccagtcaagttcattgtcggtgatttggacttgacttaccactttccaggtgctcaaaaatacattcacggtgaaggtttcaagaaggctgtcccaggtttggaagaagttgtcgttatggaggatacctctcacttcattaaccaagaaagaccacacgaaattaattctcacatccacgatttcttctctaagttctgttaa

SEQ ID NO: 123 - DNA, 951 bp, Artificial Sequence
  Synthetic
atggatcaaattgaacacatcactattaacaccaacggtatcaaaatgcatatcgcctctgttggtactggtcctgttgttttgttgttgcatggtttcccagaattgtggtactcttggcgtcatcaattgttgtatttgtcctctgtcggttacagagctattgctccagatttaagaggttacggtgatactgactctccagcctctccaacttcttataccgctttgcatatcgttggtgacttggtcggtgctttggatgaattgggtattgaaaaggtcttcttggtcggtcatgattgggctgccatcatcgcttggtacttttgtttgtttagaccagatcgtattaaagctttagttaatttgtctgttcaattcatcccaagaaacccagctatcccatttattgaaggtttcagaaccgcttttggtgatgatttctacatgtgtagattccaagttccaggtgaagctgaagaagactttgcttctattgatactgctcaattgttcaaaacctccttgtgtaacagatcctccgctccaccatgcttgccaaaagaaatcggtttcagagctattccaccaccagaaaatttgccatcttggttgaccgaggaagacattaattactacgctgctaagttcaagcaaaccggtttcactggtgctttaaactactatagagctttcgatttgacctgggaattaactgctccatggaccggtgctcaaattcaagtcccagtcaagttcattgttggtgattctgacttgacttaccattttccaggtgctaaggaatacatccacaacggtggtttcaagaaggacgttccattgttggaagaagttgttgttgtcaaggacgcttgtcacttcatcaaccaagaaagaccacaagaaattaacgctcacattcatgactttattaacaagttctaa

SEQ ID NO: 124 - DNA, 942 bp, Artificial Sequence
  Synthetic
atggagaagatcgaacactcaacgattgccaccaacggaataaatatgcatgtggcgagcgcaggtagtgggccagctgttcttttcctgcatggttttcctgaattgtggtactcttggagacatcaactattatatctctcctcgttaggatatcgcgctattgcaccggatttgaggggctttggtgacacagatgcccccccatctccttcatcttacactgctcaccacatagtaggcgacctggtcggtttgttagatcagctaggagtagatcaagttttcctagtcggtgactggggagcgatgatggcttggtatttttgcttatttagacctgatcgggttaaagctcttgtgaatttgagtgtgcatttcacaccacgtaacccagcaatttcccctttggatggctttcgacttatgttaggggatgacttctacgtatgtaaattccaagagccaggtgttgccgaagcagattttggttcggttgacactgctaccatgttcaagaaatttttgacgatgagagatccgaggcccccaatcattcccaatggttttagaagtcttgcgacacccgaagcactcccttcttggttaactgaagaggatatagactattttgccgcaaagttcgctaagaccggtttcacgggcgggtttaattactatagagccattgatctaacatgggaattaactgccccttggtcaggaagcgaaatcaaagtcccgactaaatttatagtaggggacctggatctcgtttatcatttcccaggtgtcaaagaatatattcatggaggaggttttaaaaaggacgttccatttttggaggaagttgtcgtaatggaaggtgctgctcactttataaaccaggagaaggcagatgagatcaactcattgatctacgattttattaaacaattctaa

SEQ ID NO: 125 - DNA, 951 bp, Artificial Sequence
  Synthetic
atggagaagatcgaacacaccacgatttcaacaaacggaataaatatgcatgtggcgagcattggtagtgggccagccgttcttttcctgcatggttttcctgaattgtggtactcttggagacatcaactattatttctctcctcgatgggatatcgcgctatcgcaccggatttgaggggcttcggtgacactgatgctcccccatctccttcatcttatacagcacaccacatagtaggcgacctagtcggtttattagatcagctgggaattgatcaagttttcctcgtaggtcatgactggggcgccatgatggcttggtacttttgcttgtttcgtccagatagagttaaagcgttagttaatttgtccgtccatttcttacggcgacatcctagtattaaatttgtcgatgggtttagagcactactaggtgacgatttttatttctgtcaatttcaggaaccaggcgtggctgaagccgactttggttctgtggatgttgctactatgttgaagaaattccttaccatgagagatccacgtccccccatgatacctaaggagaaaggcttcagggcattagaaactcctgatccactcccagcctggttgacagaggaagatatagactatttcgcgggaaagtttagaaaaactggatttaccggtggtttcaactactatagagcttttaatcttacgtgggaacttacagcaccgtggtctggttcggaaatcaaggtagctgcaaaatttattgtgggagatcttgatctcgtttaccacttcccgggcgccaaagaatacattcatggaggtggctttaaaaaagacgttcccttattggaagaggtcgtagtggtcgatggggccgctcacttcataaaccaagagaggcctgctgagatttcttcacttatctatgacttcatcaagaagttttaa

SEQ ID NO: 126 - DNA, 1587 bp, Artificial Sequence
  Synthetic
atggtggaccaatgtgcacttgggtggatcctagcgtcagctctgggcttagtaatagccctctgcttctttgtcgctcctcgaagaaaccaccgcggagttgattcgaaagagagagatgaatgtgttcagtctgcggcaaccactaagggtgaatgtaggtttaatgaccgtgatgtagatgttattgtcgtgggtgctggtgttgccggatccgcattggcacatacgttgggcaaagacggtagaagggtgcatgtaattgaaagagacctcacagaaccagatcggatagttggggagttacttcaaccgggtggttacttaaagctaatcgagttaggattgcaagattgcgtggaagaaattgatgctcagagagtatatggctatgccttgttcaaagatggaaaaaatacacgtttgagctacccattagagaactttcacagtgacgtttctggtcgatcattccataatggtagatttattcaacgtatgagagaaaaggctgcgtccctacccaacgtcaggctggaacaaggaactgttacctcgctcttggaggaaaaaggcactatcaagggtgtccaatataaatcaaagaatggggaagaaaaaacagcatacgctccgctcactatagtgtgtgacggttgtttctctaacttacgccgaagtctgtgcaatcctatggtcgatgttccaagctattttgtaggcttggtgttggaaaattgcgagctgccattcgctaaccacggacatgtaattttaggcgatccttctcccattcttttttaccagatttccaggaccgaaataagatgtttggttgatgtccctggtcaaaaagttccatcaatagcaaatggcgagatggaaaagtatctgaaaacagtggtagctcctcaggttcctccacaaatctatgatagttttattgcggccatagacaagggtaacatcaggacgatgcccaatagatctatgccagctgccccacatcctacgccgggtgcccttctaatgggggatgcatttaacatgagacatcccctgacaggaggtggtatgaccgtggcattgagcgatattgtagttttacgtaatcttttaaaacctctcaaggacctgtcagatgcaagtactctgtgcaagtatttagaaagtttctacacccttagaaaaccagttgcttcaactattaacacgttggccggggctctatataaagtattttgtgcctctccggaccaggctaggaaagaaatgcgtcaagcttgtttcgattatttatccttgggaggcatattttcaaatggccctgtatcgctattaagcggactaaacccaagaccactatctctagtcctccacttctttgctgtggcaatatacggtgttggtcgcttgctacttccatttccttctgtcaaggggatctggattggagcgcgtttaatctatagcgcgagtggtattatttttcccattataagagctgagggtgttagacagatgtttttccctgcaacagttcctgcctactataggtccccacccgtgttcaaacccatagtttaa

SEQ ID NO: 127 - DNA, 1575 bp, Artificial Sequence
  Synthetic
atggtggaccaatgtgcacttgggtggatcctagcgtcagttctgggcgctgccgcactctactttttgttcggacgaaaaaatggtggtgtatcgaacgaaaggcgccatgagtccataaagaatattgctactaccaacggtgaatataaaagctctaattccgatggggatattataatcgtcggcgcaggagttgctggtagtgccttagcttatacgttgggtaaggacggaagaagagtgcacgtcattgagcgtgatttgacagaaccggatagaatcgtgggggaattattgcagcccggcggttacttaaaactaactgagttaggtcttgaagactgcgttgatgatattgacgcacaaagggtatatggttacgctttatttaaggatggtaaagatacacggctatcttatccattagaaaagttccattcagacgtagccggaaggtcttttcacaacggcagattcatccaaagaatgcgggaaaaagcggctagtttgccaaaagtttcacttgagcagggtaccgtaacttcgctgcttgaagaaaatggcattataaagggcgtccaatacaaaacaaaaacaggtcaagaaatgaccgcctatgcacctctcactattgtttgtgacggatgcttttctaacctgcgtagatccttgtgtaatcctaaggttgatgtaccatcatgctttgtgggcttagttcttgagaactgtgatctaccctacgctaatcatgggcatgtgatactggctgaccctagtccaatattgttctatcgaatttcttcaacggagatcagatgtttagtcgacgttcccggacaaaaagttccttcgatctctaatggtgaaatggcgaattacctgaagaacgtagtcgccccacagataccaagtcagttgtatgatagctttgttgcagcaattgataaaggaaatattaggactatgccgaaccgtagcatgccggccgatccttatcccactccgggtgctttattgatgggtgacgcgtttaatatgagacacccattgacaggcggaggtatgaccgtcgcgctgagtgatgttgtcgtgctaagagacctattaaaaccattacgcgatttaaacgatgctcctacactgtcaaagtaccttgaagcattctacacgctacgaaaaccagtagccagtaccatcaacacattggctggtgcattgtataaggtgttttgcgcatctccagatcaagcacgtaaagaaatgagacaggcatgtttcgattatttgtctcttggtggtattttttccaatggacctgtatcactactctcagggttgaatccaaggccaattagcctagtactacatttctttgccgttgccatctacggcgtaggtcgtctattaataccgtttccttctcctaagagagtctggatcggcgctagaattataagcggcgcttcggcaattatcttccctataataaaggctgaaggagttagacaaatgttctttccggctactgtggcggcttattatcgtgcaccaagagttgtcaagggtaggtaa

SEQ ID NO: 128 - DNA, 1536 bp, Artificial Sequence
  Synthetic
atggacggggtaattgatatgcagaccatacccctacgtacggccatcgcaattggaggcactgcggttgctcttgtcgtggctttgtacttctggtttctccgtagctatgcatctccttcccaccattcaaatcatttaccgcctgttccagaagtaccaggtgtgccagttttaggtaacctgttgcaattgaaagagaagaaaccctatatgacatttactaagtgggccgaaatgtacggtcctatctattcgattcgcacaggagctacatcaatggtcgttgtaagtagtaatgagatagcgaaagaagtggttgtgactaggttcccatctatctcaactagaaaactgtcctatgccttgaaggtcttaaccgaagataaatctatggtcgcaatgagcgattaccatgactaccacaaaacagttaagcgacatattttaacggctgttctaggcccaaacgcacaaaagaaatttagagctcacagagataccatgatggagaatgtaagcaacgaattgcatgctttctttgaaaagaatcctaatcaggaagtcaaccttagaaaaatatttcaatcccaacttttcggtttagctatgaaacaggcattagggaaggatgtggaatctatttatgtaaaggacctggaaactaccatgaaaagggaagagatattcgaagttcttgttgttgaccccatgatgggagccattgaagtcgattggcgagattttttcccgtatctcaaatgggtgccaaataaatcttttgaaaatataatccataggatgtacacgagaagagaggccgttatgaaagcgttgattcaagagcacaagaaaaggatcgcttcaggtgagaacctaaattcctacatagattatctcttgagtgaagctcaaacattaactgacaaacagttattaatgtcgttgtgggaacctattatagaatcgtctgatactaccatggtaacaacagaatgggcaatgtatgaacttgcgaagaaccctaatatgcaagatcgtctgtacgaagagattcaatcggtttgtggaagcgagaagattacagaagaaaacttatcacaactcccatatctatatgccgttttccaggaaactctgagaaagcattgccctgtgccgatcatgccacttagatacgtacatgagaacactgttttgggtggttaccacgtaccagcaggcaccgaagtggcaatcaatatttatggctgtaatatggacaagaaagtgtgggaaaatcccgaagagtggaatccagaacgttttctgtctgaaaaagagagtatggatttgtataaaacgatggcatttggtggaggtaaaagagtttgtgcgggatctctacaagctatggtaattagttgcatcggcatcgggaggttagttcaagattttgaatggaaactaaaagatgacgctgaagaagatgtgaatacattaggtttgactacgcaaaagctacaccctttgttagcactaattaacccgcggaaa

SEQ ID NO: 129 - protein, 520 aa, Siraitia grosvenorii
MEMSSSVAATISIWMVVVCIVGVGWRVVNWVWLRPKKLEKRLREQGLAGNSYRLLFGDLKERAAMEEQANSKPINFSHDIGPRVFPSMYKTIQNYGKNSYMWLGPYPRVHIMDPQQLKTVFTLVYDIQKPNLNPLIKFLLDGIVTHEGEKWAKHRKIINPAFHLEKLKDMIPAFFHSCNEIVNEWERLISKEGSCELDVMPYLQNLAADAISRTAFGSSYEEGKMIFQLLKELTDLVVKVAFGVYIPGWRFLPTKSNNKMKEINRKIKSLLLGIINKRQKAMEEGEAGQSDLLGILMESNSNEIQGEGNNKEDGMSIEDVIEECKVFYIGGQETTARLLIWTMILLSSHTEWQERARTEVLKVFGNKKPDFDGLSRLKVVTMILNEVLRLYPPASMLTRIIQKETRVGKLTLPAGVILIMPIILIHRDHDLWGEDANEFKPERFSKGVSKAAKVQPAFFPFGWGPRICMGQNFAMIEAKMALSLILQRFSFELSSSYVHAPTVVFTTQPQHGAHIVLRKL

SEQ ID NO: 130 - protein, 473 aa, Siraitia grosvenorii
MWTVVLGLATLFVAYYIHWINKWRDSKFNGVLPPGTMGLPLIGETIQLSRPSDSLDVHPFIQKKVERYGPIFKTCLAGRPVVVSADAEFNNYIMLQEGRAVEMWYLDTLSKFFGLDTEWLKALGLIHKYIRSITLNHFGAEALRERFLPFIEASSMEALHSWSTQPSVEVKNASALMVFRTSVNKMFGEDAKKLSGNIPGKFTKLLGGFLSLPLNFPGTTYHKCLKDMKEIQKKLREVVDDRLANVGPDVEDFLGQALKDKESEKFISEEFIIQLLFSISFASFESISTTLTLILKLLDEHPEVVKELEAEHEAIRKARADPDGPITWEEYKSMTFTLQVINETLRLGSVTPALLRKTVKDLQVKGYIIPEGWTIMLVTASRHRDPKVYKDPHIFNPWRWKDLDSITIQKNFMPFGGGLRHCAGAEYSKVYLCTFLHILCTKYRWTKLGGGRIARAHILSFEDGLHVKFTPKE

SEQ ID NO: 131 - protein, 701 aa, Siraitia grosvenorii
MKVSPFEFMSAIIKGRMDPSNSSFESTGEVASVIFENRELVAILTTSIAVMIGCFVVLMWRRAGSRKVKNVELPKPLIVHEPEPEVEDGKKKVSIFFGTQTGTAEGFAKALADEAKARYEKATFRVVDLDDYAADDDQYEEKLKNESFAVFLLATYGDGEPTDNAARFYKWFAEGKERGEWLQNLHYAVFGLGNRQYEHFNKIAKVADELLEAQGGNRLVKVGLGDDDQCIEDDFSAWRESLWPELDMLLRDEDDATTVTTPYTAAVLEYRVVFHDSADVAAEDKSWINANGHAVHDAQHPFRSNVVVRKELHTSASDRSCSHLEFNISGSALNYETGDHVGVYCENLTETVDEALNLLGLSPETYFSIYTDNEDGTPLGGSSLPPPFPSCTLRTALTRYADLLNSPKKSALLALAAHASNPVEADRLRYLASPAGKDEYAQSVIGSQKSLLEVMAEFPSAKPPLGVFFAAVAPRLQPRFYSISSSPRMAPSRIHVTCALVYDKMPTGRIHKGVCSTWMKNSVPMEKSHECSWAPIFVRQSNFKLPAESKVPIIMVGPGTGLAPFRGFLQERLALKESGVELGPSILFFGCRNRRMDYIYEDELNNFVETGALSELVIAFSREGPTKEYVQHKMAEKASDIWNLISEGAYLYVCGDAKGMAKDVHRTLHTIMQEQGSLDSSKAESMVKNLQMNGRYLRDVW

SEQ ID NO: 132 - protein, 692 aa, Arbidopsis thaliana [sequence omitted]

SEQ ID NO: 133 - protein, 316 aa, Siraitia grosvenorii
MDEIEHITINTNGIKMHIASVGTGPVVLLLHGFPELWYSWRHQLLYLSSVGYRAIAPDLRGYGDTDSPASPTSYTALHIVGDLVGALDELGIEKVFLVGHDWGAIIAWYFCLFRPDRIKALVNLSVQFIPRNPAIPFIEGFRTAFGDDFYICRFQVPGEAEEDFASIDTAQLFKTSLCNRSSAPPCLPKEIGFRAIPPPENLPSWLTEEDINFYAAKFKQTGFTGALNYYRAFDLTWELTAPWTGAQIQVPVKFIVGDSDLTYHFPGAKEYIHNGGFKRDVPLLEEVVVVKDACHFINQERPQEINAHIHDFINKF

SEQ ID NO: 134 - protein, 317 aa, Siraitia grosvenorii
MDAIEHRTVSVNGINMHVAEKGEGPVVLLLHGFPELWYSWRHQILALSSLGYRAVAPDLRGYGDTDAPGSISSYTCFHIVGDLVALVESLGMDRVFVVAHDWGAMIAWCLCLFRPEMVKAFVCLSVPFRQRNPKMKPVQSMRAFFGDDYYICRFQNPGEIEEEMAQVGAREVLRGILTSRRPGPPILPKGQAFRARPGASTALPSWLSEKDLSFFASKYDQKGFTGPLNYYRAMDLNWELTASWTGVQVKVPVKYIVGDVDMVFTTPGVKEYVNGGGFKKDVPFLQEVVIMEGVGHFINQEKPEEISSHIHDFISKF

SEQ ID NO: 135 - protein, 316 aa, Siraitia grosvenorii
MDQIEHITINTNGIKMHIASVGTGPVVLLLHGFPELWYSWRHQLLYLSSVGYRAIAPDLRGYGDTDSPASPTSYTALHIVGDLVGALDELGIEKVFLVGHDWGAIIAWYFCLFRPDRIKALVNLSVQFIPRNPAIPFIEGFRTAFGDDFYMCRFQVPGEAEEDFASIDTAQLFKTSLCNRSSAPPCLPKEIGFRAIPPPENLPSWLTEEDINYYAAKFKQTGFTGALNYYRAFDLTWELTAPWTGAQIQVPVKFIVGDSDLTYHFPGAKEYIHNGGFKKDVPLLEEVVVVKDACHFINQERPQEINAHIHDFINKF

SEQ ID NO: 136 - protein, 316 aa, Siraitia grosvenorii
MEKIEHTTISTNGINMHVASIGSGPAVLFLHGFPELWYSWRHQLLFLSSMGYRAIAPDLRGFGDTDAPPSPSSYTAHHIVGDLVGLLDQLGIDQVFLVGHDWGAMMAWYFCLFRPDRVKALVNLSVHFLRRHPSIKFVDGFRALLGDDFYFCQFQEPGVAEADFGSVDVATMLKKFLTMRDPRPPMIPKEKGFRALETPDPLPAWLTEEDIDYFAGKFRKTGFTGGFNYYRAFNLTWELTAPWSGSEIKVAAKFIVGDLDLVYHFPGAKEYIHGGGFKKDVPLLEEVVVVDGAAHFINQERPAEISSLIYDFIKKF

SEQ ID NO: 137 - protein, 314 aa, Siraitia grosvenorii
MEKIEHSTIATNGINMHVASAGSGPAVLFLHGFPELWYSWRHQLLYLSSLGYRAIAPDLRGFGDTDAPPSPSSYTAHHIVGDLVGLLDQLGVDQVFLVGHDWGAMMAWYFCLFRPDRVKALVNLSVHFTPRNPAISPLDGFRLMLGDDFYVCKFQEPGVAEADFGSVDTATMFKKFLTMRDPRPPIIPNGFRSLATPEALPSWLTEEDIDYFAAKFAKTGFTGGFNYYRAIDLTWELTAPWSGSEIKVPTKFIVGDLDLVYHFPGVKEYIHGGGFKKDVPFLEEVVVMEGAAHFINQEKADEINSLIYDFIKQF

SEQ ID NO: 138 - protein, 316 aa, Siraitia grosvenorii
MENIEHTTVQTNGIKMHVAAIGTGPPVLLLHGFPELWYSWRHQLLYLSSAGYRAIAPDLRGYGDTDAPPSPSSYTALHIVGDLVGLLDVLGIEKVFLIGHDWGAIIAWYFCLFRPDRIKALVNLSVQFFPRNPTTPFVKGFRAVLGDQFYMVRFQEPGKAEEEFASVDIREFFKNVLSNRDPQAPYLPNEVKFEGVPPPALAPWLTPEDIDVYADKFAETGFTGGLNYYRAFDRTWELTAPWTGARIGVPVKFIVGDLDLTYHFPGAQKYIHGEGFKKAVPGLEEVVVMEDTSHFINQERPHEINSHIHDFFSKFC

SEQ ID NO: 139 - protein, 316 aa, Siraitia grosvenorii
MDQIEHITINTNGIKMHIASVGTGPVVLLLHGFPELWYSWRHQLLYLSSVGYRAIAPDLRGYGDTDSPASPTSYTALHIVGDLVGALDELGIEKVFLVGHDWAAIIAWYFCLFRPDRIKALVNLSVQFIPRNPAIPFIEGFRTAFGDDFYMCRFQVPGEAEEDFASIDTAQLFKTSLCNRSSAPPCLPKEIGFRAIPPPENLPSWLTEEDINYYAAKFKQTGFTGALNYYRAFDLTWELTAPWTGAQIQVPVKFIVGDSDLTYHFPGAKEYIHNGGFKKDVPLLEEVVVVKDACHFINQERPQEINAHIHDFINKF

SEQ ID NO: 140 - protein, 313 aa, Siraitia grosvenorii
MEKIEHSTIATNGINMHVASAGSGPAVLFLHGFPELWYSWRHQLLYLSSLGYRAIAPDLRGFGDTDAPPSPSSYTAHHIVGDLVGLLDQLGVDQVFLVGDWGAMMAWYFCLFRPDRVKALVNLSVHFTPRNPAISPLDGFRLMLGDDFYVCKFQEPGVAEADFGSVDTATMFKKFLTMRDPRPPIIPNGFRSLATPEALPSWLTEEDIDYFAAKFAKTGFTGGFNYYRAIDLTWELTAPWSGSEIKVPTKFIVGDLDLVYHFPGVKEYIHGGGFKKDVPFLEEVVVMEGAAHFINQEKADEINSLIYDFIKQF

SEQ ID NO: 141 - protein, 316 aa, Siraitia grosvenorii; identical to SEQ ID NO: 136

SEQ ID NO: 142 - protein, 528 aa, Siraitia grosvenorii
MVDQCALGWILASALGLVIALCFFVAPRRNHRGVDSKERDECVQSAATTKGECRFNDRDVDVIVVGAGVAGSALAHTLGKDGRRVHVIERDLTEPDRIVGELLQPGGYLKLIELGLQDCVEEIDAQRVYGYALFKDGKNTRLSYPLENFHSDVSGRSFHNGRFIQRMREKAASLPNVRLEQGTVTSLLEEKGTIKGVQYKSKNGEEKTAYAPLTIVCDGCFSNLRRSLCNPMVDVPSYFVGLVLENCELPFANHGHVILGDPSPILFYQISRTEIRCLVDVPGQKVPSIANGEMEKYLKTVVAPQVPPQIYDSFIAAIDKGNIRTMPNRSMPAAPHPTPGALLMGDAFNMRHPLTGGGMTVALSDIVVLRNLLKPLKDLSDASTLCKYLESFYTLRKPVASTINTLAGALYKVFCASPDQARKEMRQACFDYLSLGGIFSNGPVSLLSGLNPRPLSLVLHFFAVAIYGVGRLLLPFPSVKGIWIGARLIYSASGIIFPIIRAEGVRQMFFPATVPAYYRSPPVFKPIV

SEQ ID NO: 143 - protein, 524 aa, Siraitia grosvenorii
MVDQCALGWILASVLGAAALYFLFGRKNGGVSNERRHESIKNIATTNGEYKSSNSDGDIIIVGAGVAGSALAYTLGKDGRRVHVIERDLTEPDRIVGELLQPGGYLKLTELGLEDCVDDIDAQRVYGYALFKDGKDTRLSYPLEKFHSDVAGRSFHNGRFIQRMREKAASLPKVSLEQGTVTSLLEENGIIKGVQYKTKTGQEMTAYAPLTIVCDGCFSNLRRSLCNPKVDVPSCFVGLVLENCDLPYANHGHVILADPSPILFYRISSTEIRCLVDVPGQKVPSISNGEMANYLKNVVAPQIPSQLYDSFVAAIDKGNIRTMPNRSMPADPYPTPGALLMGDAFNMRHPLTGGGMTVALSDVVVLRDLLKPLRDLNDAPTLSKYLEAFYTLRKPVASTINTLAGALYKVFCASPDQARKEMRQACFDYLSLGGIFSNGPVSLLSGLNPRPISLVLHFFAVAIYGVGRLLIPFPSPKRVWIGARIISGASAIIFPIIKAEGVRQMFFPATVAAYYRAPRVVKGR

SEQ ID NO: 144 - protein, 512 aa, Lactuca sativa
MDGVIDMQTIPLRTAIAIGGTAVALVVALYFWFLRSYASPSHHSNHLPPVPEVPGVPVLGNLLQLKEKKPYMTFTKWAEMYGPIYSIRTGATSMVVVSSNEIAKEVVVTRFPSISTRKLSYALKVLTEDKSMVAMSDYHDYHKTVKRHILTAVLGPNAQKKFRAHRDTMMENVSNELHAFFEKNPNQEVNLRKIFQSQLFGLAMKQALGKDVESIYVKDLETTMKREEIFEVLVVDPMMGAIEVDWRDFFPYLKWVPNKSFENIIHRMYTRREAVMKALIQEHKKRIASGENLNSYIDYLLSEAQTLTDKQLLMSLWEPIIESSDTTMVTTEWAMYELAKNPNMQDRLYEEIQSVCGSEKITEENLSQLPYLYAVFQETLRKHCPVPIMPLRYVHENTVLGGYHVPAGTEVAINIYGCNMDKKVWENPEEWNPERFLSEKESMDLYKTMAFGGGKRVCAGSLQAMVISCIGIGRLVQDFEWKLKDDAEEDVNTLGLTTQKLHPLLALINPRK

SEQ ID NO: 145-206 - skipped (62 entries)

SEQ ID NO: 207 - DNA, 1422 bp, Artificial Sequence
  Synthetic
atgtggactgtcgtgctcggtttggcgacgctgtttgtcgcctactacatccattggattaacaaatggagagattccaagttcaacggagttctgccgccgggcaccatgggtttgccgctcatcggagaaacgattcaactgagtcgacccagtgactccctcgacgttcaccctttcatccagaaaaaagttgaaagatacgggccgatcttcaaaacatgtctggccggaaggccggtggtggtgtcggcggacgcagagttcaacaactacataatgctgcaggaaggaagagcagtggaaatgtggtatttggatacgctctccaaatttttcggcctcgacaccgagtggctcaaagctctgggcctcatccacaagtacatcagaagcattactctcaatcacttcggcgccgaggccctgcgggagagatttcttccttttattgaagcatcctccatggaagcccttcactcctggtctactcaacctagcgtcgaagtcaaaaatgcctccgctctcatggtttttaggacctcggtgaataagatgttcggtgaggatgcgaagaagctatcgggaaatatccctgggaagttcacgaagcttctaggaggatttctcagtttaccactgaattttcccggcaccacctaccacaaatgcttgaaggatatgaaggaaatccagaagaagctaagagaggttgtagacgatagattggctaatgtgggccctgatgtggaagatttcttggggcaagcccttaaagataaggaatcagagaagttcatttcagaggagttcatcatccaactgttgttttctatcagttttgctagctttgagtccatctccaccactcttactttgattctcaagctccttgatgaacacccagaagtagtgaaagagttggaagctgaacacgaggcgattcgaaaagctagagcagatccagatggaccaattacttgggaagaatacaaatccatgacttttacattacaagtcatcaatgaaaccctaaggttggggagtgtcacacctgccttgttgaggaaaacagttaaagatcttcaagtaaaaggatacataatcccggaaggatggacaataatgcttgtcaccgcttcacgtcacagagatccaaaagtctataaggaccctcatatcttcaatccatggcgttggaaggacttggactcaattaccatccaaaagaacttcatgccttttgggggaggcttaaggcattgtgctggtgctgagtactctaaagtctacttgtgcaccttcttgcacatcctctgtaccaaataccgatggaccaaacttgggggaggaaggattgcaagagctcatatattgagttttgaagatgggttacatgtgaagttcacgccaaaagaataa

SEQ ID NO: 208 - protein, 473 aa, Siraitia grosvenorii; identical to SEQ ID NO: 130

SEQ ID NO: 209 - protein, 32 aa, Artificial Sequence
  Synthetic
MNLKQFTCLSCAQLLAILLFIFAFFPRKIVLT

SEQ ID NO: 210 - protein, 29 aa, Artificial Sequence
  Synthetic
MIPSNKRNARILSITTLLLLLVFFVAQNA

SEQ ID NO: 211 - protein, 19 aa, Artificial Sequence
  Synthetic
MTFMQQLQEAGERFRCING

SEQ ID NO: 212 - protein, 61 aa, Artificial Sequence
  Synthetic
MLSKVLLNIAFKVLLTTAKRAVDPDDDDELLPSPDLPGSDDPIAGDPDVDLNPVTEEMFSS

SEQ ID NO: 213 - protein, 8 aa, Artificial Sequence
  Synthetic
MNVTSNAT

SEQ ID NO: 214 - protein, 24 aa, Artificial Sequence
  Synthetic
MNVIFSLASFVKNMYNASLNQRNL

SEQ ID NO: 215 - protein, 16 aa, Artificial Sequence
  Synthetic
MNWKSYVFPGGHPPAA

SEQ ID NO: 216 - protein, 42 aa, Artificial Sequence
  Synthetic
MFFNRLSAGKLLVPLSVVLYALFVVILPLQNSFHSSNVLVRG

SEQ ID NO: 217 - protein, 37 aa, Artificial Sequence
  Synthetic
MSSAKPINVYSIPELNQALDEALPSVFARLNYERSYA

SEQ ID NO: 218 - protein, 16 aa, Artificial Sequence
  Synthetic
MDRDHINDHDHRMSYS

SEQ ID NO: 219 - protein, 19 aa, Artificial Sequence
  Synthetic
MKASYLVLIFISIFSMAQA

SEQ ID NO: 220 - protein, 6 aa, Artificial Sequence
  Synthetic
MSLYYT

SEQ ID NO: 221 - protein, 6 aa, Artificial Sequence
  Synthetic
MLSNTL

SEQ ID NO: 222 - protein, 33 aa, Artificial Sequence
  Synthetic
MRVRPKRSVITLMAIVVVMLILRNQFYSSRTRG

SEQ ID NO: 223 - protein, 7 aa, Artificial Sequence
  Synthetic
MPFGIDN

SEQ ID NO: 224 - protein, 25 aa, Artificial Sequence
  Synthetic
MIKSTIALPSFFIVLILALVNSVAA

SEQ ID NO: 225 - protein, 28 aa, Artificial Sequence
  Synthetic
MNFKILLPICALLTLTTFLLTIIATAGS

SEQ ID NO: 226 - protein, 22 aa, Artificial Sequence
  Synthetic
MSEVAETWVDTWMAKLVNYDYK

SEQ ID NO: 227 - protein, 43 aa, Artificial Sequence
  Synthetic
MSLISILSPLITSEGLDSRIKPSPKKDASTTTKPSLWKTTEFK

SEQ ID NO: 228 - protein, 6 aa, Artificial Sequence
  Synthetic
MAIDAQ

SEQ ID NO: 229 - protein, 32 aa, Artificial Sequence
  Synthetic
MSGFRLIDIVKPILPILPEVELPFEKLPFDDK

SEQ ID NO: 230 - protein, 11 aa, Artificial Sequence
  Synthetic
MAFEDYFSFQI

SEQ ID NO: 231 - protein, 55 aa, Artificial Sequence
  Synthetic
MSAVFNNATLSGLVQASTYSQTLQNVAHYQPQLNFMEKYWAAWYSYMNNDVLATG

SEQ ID NO: 232 - protein, 26 aa, Artificial Sequence
  Synthetic
MSATKSIVGEALEYVNIGLSHFLALP

SEQ ID NO: 233 - DNA, 96 bp, Artificial Sequence
  Synthetic
atgaacttgaagcagttcacgtgcctatcatgcgctcaattactcgctattctgctctttatctttgcttttttccctagaaaaatcgtgctgaca

SEQ ID NO: 234 - DNA, 87 bp, Artificial Sequence
  Synthetic
atgataccttccaataagagaaatgctagaattttaagcattacaacgctattattgttgttagtgtttttcgtagcgcaaaatgcg

SEQ ID NO: 235 - DNA, 57 bp, Artificial Sequence
  Synthetic
atgacttttatgcaacagcttcaagaggctggggaaagatttaggtgtatcaatggt

SEQ ID NO: 236 - DNA, 183 bp, Artificial Sequence
  Synthetic
atgctatccaaggtattgctgaatatagctttcaaggtgctgttaaccaccgccaagagagcagttgatcctgacgatgatgatgaacttctaccttccccggatctcccgggtagcgatgaccctattgcaggtgatcctgatgtagacttaaaccctgttacagaagaaatgttctcttca

SEQ ID NO: 237 - DNA, 24 bp, Artificial Sequence
  Synthetic
atgaacgtaacatcgaatgcaact

SEQ ID NO: 238 - DNA, 72 bp, Artificial Sequence
  Synthetic
atgaatgtcatattttctttggcgagtttcgtcaaaaacatgtataatgcaagtttgaaccaacgtaatcta

SEQ ID NO: 239 - DNA, 48 bp, Artificial Sequence
  Synthetic
atgaattggaagtcgtacgtttttcccggtggtcatccaccagctgcg

SEQ ID NO: 240 - DNA, 126 bp, Artificial Sequence
  Synthetic
atgtttttcaacagactaagcgctggcaagctgctggtaccactctccgtggtcctgtacgcccttttcgtggtaatattacctttacagaatagtttccactcctccaatgttttagttagaggt

SEQ ID NO: 241 - DNA, 111 bp, Artificial Sequence
  Synthetic
atgagttctgctaaacctattaatgtatattcaatcccggagttgaaccaagctttagatgaagccctaccttctgttttcgcgagattaaattacgagagatcatacgct

SEQ ID NO: 242 - DNA, 48 bp, Artificial Sequence
  Synthetic
atggacagagatcatattaatgaccatgaccatcgaatgagctattcc

SEQ ID NO: 243 - DNA, 57 bp, Artificial Sequence
  Synthetic
atgaaggccagttacttagttttgattttcattagcatattctccatggcacaggca

SEQ ID NO: 244 - DNA, 18 bp, Artificial Sequence
  Synthetic
atgtcattatattacacc

SEQ ID NO: 245 - DNA, 18 bp, Artificial Sequence
  Synthetic
atgcttagtaatacactt

SEQ ID NO: 246 - DNA, 99 bp, Artificial Sequence
  Synthetic
atgagagtaagaccaaagaggtcggtcataacactcatggcgatagtagtcgtgatgctcatcctcagaaaccagttctactcatcacgaacgcgaggg

SEQ ID NO: 247 - DNA, 21 bp, Artificial Sequence
  Synthetic
atgccgtttggaatagacaac

SEQ ID NO: 248 - DNA, 75 bp, Artificial Sequence
  Synthetic
atgatcaaatctacaattgctctaccctctttcttcattgttttaattttggcgttggtcaattcagtggctgca

SEQ ID NO: 249 - DNA, 84 bp, Artificial Sequence
  Synthetic
atgaattttaaaatactcctcccgatttgtgctttattgacacttacaacatttctgttgaccattattgcaactgcgggttct

SEQ ID NO: 250 - DNA, 66 bp, Artificial Sequence
  Synthetic
atgtctgaagtagcggaaacatgggtggatacctggatggcaaaattagtcaactatgactacaag

SEQ ID NO: 251 - DNA, 129 bp, Artificial Sequence
  Synthetic
atgtcgctgatcagcatcctgtctcccctaattacttccgagggcttagattcaagaatcaaaccttcaccaaaaaaggatgcctctactaccactaagccatcactatggaaaactactgagttcaaa

SEQ ID NO: 252 - DNA, 18 bp, Artificial Sequence
  Synthetic
atggctattgatgctcaa

SEQ ID NO: 253 - DNA, 96 bp, Artificial Sequence
  Synthetic
atgtctggttttcgtctaattgatatcgttaagcctatcctaccgattttaccggaagttgagttaccttttgaaaaattaccatttgatgacaag

SEQ ID NO: 254 - DNA, 33 bp, Artificial Sequence
  Synthetic
atggcgtttgaggattatttttctttccagata

SEQ ID NO: 255 - DNA, 165 bp, Artificial Sequence
  Synthetic
atgtctgccgttttcaacaacgctaccctttcaggtctagtccaagcaagcacctactcacaaactttgcaaaatgtcgcccattaccaacctcaattgaatttcatggagaaatactgggccgcatggtacagttacatgaacaatgatgttttggccaccggt

SEQ ID NO: 256 - DNA, 78 bp, Artificial Sequence
  Synthetic
atgtctgctaccaagtcaatcgttggagaggcattggaatacgtaaacattggtttaagtcatttcttggctttacca

SEQ ID NO: 257 - protein, 504 aa, Artificial Sequence
  Synthetic
MNLKQFTCLSCAQLLAILLFIFAFFPRKIVLTWTVVLGLATLFVAYYIHWINKWRDSKFNGVLPPGTMGLPLIGETIQLSRPSDSLDVHPFIQKKVERYGPIFKTCLAGRPVVVSADAEFNNYIMLQEGRAVEMWYLDTLSKFFGLDTEWLKALGLIHKYIRSITLNHFGAEALRERFLPFIEASSMEALHSWSTQPSVEVKNASALMVFRTSVNKMFGEDAKKLSGNIPGKFTKLLGGFLSLPLNFPGTTYHKCLKDMKEIQKKLREVVDDRLANVGPDVEDFLGQALKDKESEKFISEEFIIQLLFSISFASFESISTTLTLILKLLDEHPEVVKELEAEHEAIRKARADPDGPITWEEYKSMTFTLQVINETLRLGSVTPALLRKTVKDLQVKGYIIPEGWTIMLVTASRHRDPKVYKDPHIFNPWRWKDLDSITIQKNFMPFGGGLRHCAGAEYSKVYLCTFLHILCTKYRWTKLGGGRIARAHILSFEDGLHVKFTPKE

SEQ ID NO: 258 - protein, 501 aa, Artificial Sequence
  Synthetic
MIPSNKRNARILSITTLLLLLVFFVAQNAWTVVLGLATLFVAYYIHWINKWRDSKFNGVLPPGTMGLPLIGETIQLSRPSDSLDVHPFIQKKVERYGPIFKTCLAGRPVVVSADAEFNNYIMLQEGRAVEMWYLDTLSKFFGLDTEWLKALGLIHKYIRSITLNHFGAEALRERFLPFIEASSMEALHSWSTQPSVEVKNASALMVFRTSVNKMFGEDAKKLSGNIPGKFTKLLGGFLSLPLNFPGTTYHKCLKDMKEIQKKLREVVDDRLANVGPDVEDFLGQALKDKESEKFISEEFIIQLLFSISFASFESISTTLTLILKLLDEHPEVVKELEAEHEAIRKARADPDGPITWEEYKSMTFTLQVINETLRLGSVTPALLRKTVKDLQVKGYIIPEGWTIMLVTASRHRDPKVYKDPHIFNPWRWKDLDSITIQKNFMPFGGGLRHCAGAEYSKVYLCTFLHILCTKYRWTKLGGGRIARAHILSFEDGLHVKFTPKE

SEQ ID NO: 259 - protein, 491 aa, Artificial Sequence
  Synthetic
MTFMQQLQEAGERFRCINGWTVVLGLATLFVAYYIHWINKWRDSKFNGVLPPGTMGLPLIGETIQLSRPSDSLDVHPFIQKKVERYGPIFKTCLAGRPVVVSADAEFNNYIMLQEGRAVEMWYLDTLSKFFGLDTEWLKALGLIHKYIRSITLNHFGAEALRERFLPFIEASSMEALHSWSTQPSVEVKNASALMVFRTSVNKMFGEDAKKLSGNIPGKFTKLLGGFLSLPLNFPGTTYHKCLKDMKEIQKKLREVVDDRLANVGPDVEDFLGQALKDKESEKFISEEFIIQLLFSISFASFESISTTLTLILKLLDEHPEVVKELEAEHEAIRKARADPDGPITWEEYKSMTFTLQVINETLRLGSVTPALLRKTVKDLQVKGYIIPEGWTIMLVTASRHRDPKVYKDPHIFNPWRWKDLDSITIQKNFMPFGGGLRHCAGAEYSKVYLCTFLHILCTKYRWTKLGGGRIARAHILSFEDGLHVKFTPKE

SEQ ID NO: 260 - protein, 533 aa, Artificial Sequence
  Synthetic
MLSKVLLNIAFKVLLTTAKRAVDPDDDDELLPSPDLPGSDDPIAGDPDVDLNPVTEEMFSSWTVVLGLATLFVAYYIHWINKWRDSKFNGVLPPGTMGLPLIGETIQLSRPSDSLDVHPFIQKKVERYGPIFKTCLAGRPVVVSADAEFNNYIMLQEGRAVEMWYLDTLSKFFGLDTEWLKALGLIHKYIRSITLNHFGAEALRERFLPFIEASSMEALHSWSTQPSVEVKNASALMVFRTSVNKMFGEDAKKLSGNIPGKFTKLLGGFLSLPLNFPGTTYHKCLKDMKEIQKKLREVVDDRLANVGPDVEDFLGQALKDKESEKFISEEFIIQLLFSISFASFESISTTLTLILKLLDEHPEVVKELEAEHEAIRKARADPDGPITWEEYKSMTFTLQVINETLRLGSVTPALLRKTVKDLQVKGYIIPEGWTIMLVTASRHRDPKVYKDPHIFNPWRWKDLDSITIQKNFMPFGGGLRHCAGAEYSKVYLCTFLHILCTKYRWTKLGGGRIARAHILSFEDGLHVKFTPKE

SEQ ID NO: 261 - protein, 480 aa, Artificial Sequence
  Synthetic
MNVTSNATWTVVLGLATLFVAYYIHWINKWRDSKFNGVLPPGTMGLPLIGETIQLSRPSDSLDVHPFIQKKVERYGPIFKTCLAGRPVVVSADAEFNNYIMLQEGRAVEMWYLDTLSKFFGLDTEWLKALGLIHKYIRSITLNHFGAEALRERFLPFIEASSMEALHSWSTQPSVEVKNASALMVFRTSVNKMFGEDAKKLSGNIPGKFTKLLGGFLSLPLNFPGTTYHKCLKDMKEIQKKLREVVDDRLANVGPDVEDFLGQALKDKESEKFISEEFIIQLLFSISFASFESISTTLTLILKLLDEHPEVVKELEAEHEAIRKARADPDGPITWEEYKSMTFTLQVINETLRLGSVTPALLRKTVKDLQVKGYIIPEGWTIMLVTASRHRDPKVYKDPHIFNPWRWKDLDSITIQKNFMPFGGGLRHCAGAEYSKVYLCTFLHILCTKYRWTKLGGGRIARAHILSFEDGLHVKFTPKE

SEQ ID NO: 262 - protein, 496 aa, Artificial Sequence
  Synthetic
MNVIFSLASFVKNMYNASLNQRNLWTVVLGLATLFVAYYIHWINKWRDSKFNGVLPPGTMGLPLIGETIQLSRPSDSLDVHPFIQKKVERYGPIFKTCLAGRPVVVSADAEFNNYIMLQEGRAVEMWYLDTLSKFFGLDTEWLKALGLIHKYIRSITLNHFGAEALRERFLPFIEASSMEALHSWSTQPSVEVKNASALMVFRTSVNKMFGEDAKKLSGNIPGKFTKLLGGFLSLPLNFPGTTYHKCLKDMKEIQKKLREVVDDRLANVGPDVEDFLGQALKDKESEKFISEEFIIQLLFSISFASFESISTTLTLILKLLDEHPEVVKELEAEHEAIRKARADPDGPITWEEYKSMTFTLQVINETLRLGSVTPALLRKTVKDLQVKGYIIPEGWTIMLVTASRHRDPKVYKDPHIFNPWRWKDLDSITIQKNFMPFGGGLRHCAGAEYSKVYLCTFLHILCTKYRWTKLGGGRIARAHILSFEDGLHVKFTPKE

SEQ ID NO: 263 - protein, 504 aa, Artificial Sequence
  Synthetic
MNWKSYVFPGGHPPAAMNWKSYVFPGGHPPAAWTVVLGLATLFVAYYIHWINKWRDSKFNGVLPPGTMGLPLIGETIQLSRPSDSLDVHPFIQKKVERYGPIFKTCLAGRPVVVSADAEFNNYIMLQEGRAVEMWYLDTLSKFFGLDTEWLKALGLIHKYIRSITLNHFGAEALRERFLPFIEASSMEALHSWSTQPSVEVKNASALMVFRTSVNKMFGEDAKKLSGNIPGKFTKLLGGFLSLPLNFPGTTYHKCLKDMKEIQKKLREVVDDRLANVGPDVEDFLGQALKDKESEKFISEEFIIQLLFSISFASFESISTTLTLILKLLDEHPEVVKELEAEHEAIRKARADPDGPITWEEYKSMTFTLQVINETLRLGSVTPALLRKTVKDLQVKGYIIPEGWTIMLVTASRHRDPKVYKDPHIFNPWRWKDLDSITIQKNFMPFGGGLRHCAGAEYSKVYLCTFLHILCTKYRWTKLGGGRIARAHILSFEDGLHVKFTPKE

SEQ ID NO: 264 - protein, 514 aa, Artificial Sequence
  Synthetic
MFFNRLSAGKLLVPLSVVLYALFVVILPLQNSFHSSNVLVRGWTVVLGLATLFVAYYIHWINKWRDSKFNGVLPPGTMGLPLIGETIQLSRPSDSLDVHPFIQKKVERYGPIFKTCLAGRPVVVSADAEFNNYIMLQEGRAVEMWYLDTLSKFFGLDTEWLKALGLIHKYIRSITLNHFGAEALRERFLPFIEASSMEALHSWSTQPSVEVKNASALMVFRTSVNKMFGEDAKKLSGNIPGKFTKLLGGFLSLPLNFPGTTYHKCLKDMKEIQKKLREVVDDRLANVGPDVEDFLGQALKDKESEKFISEEFIIQLLFSISFASFESISTTLTLILKLLDEHPEVVKELEAEHEAIRKARADPDGPITWEEYKSMTFTLQVINETLRLGSVTPALLRKTVKDLQVKGYIIPEGWTIMLVTASRHRDPKVYKDPHIFNPWRWKDLDSITIQKNFMPFGGGLRHCAGAEYSKVYLCTFLHILCTKYRWTKLGGGRIARAHILSFEDGLHVKFTPKE

SEQ ID NO: 265 - protein, 509 aa, Artificial Sequence
  Synthetic
MSSAKPINVYSIPELNQALDEALPSVFARLNYERSYAWTVVLGLATLFVAYYIHWINKWRDSKFNGVLPPGTMGLPLIGETIQLSRPSDSLDVHPFIQKKVERYGPIFKTCLAGRPVVVSADAEFNNYIMLQEGRAVEMWYLDTLSKFFGLDTEWLKALGLIHKYIRSITLNHFGAEALRERFLPFIEASSMEALHSWSTQPSVEVKNASALMVFRTSVNKMFGEDAKKLSGNIPGKFTKLLGGFLSLPLNFPGTTYHKCLKDMKEIQKKLREVVDDRLANVGPDVEDFLGQALKDKESEKFISEEFIIQLLFSISFASFESISTTLTLILKLLDEHPEVVKELEAEHEAIRKARADPDGPITWEEYKSMTFTLQVINETLRLGSVTPALLRKTVKDLQVKGYIIPEGWTIMLVTASRHRDPKVYKDPHIFNPWRWKDLDSITIQKNFMPFGGGLRHCAGAEYSKVYLCTFLHILCTKYRWTKLGGGRIARAHILSFEDGLHVKFTPKE

SEQ ID NO: 266 - protein, 488 aa, Artificial Sequence
  Synthetic
MDRDHINDHDHRMSYSWTVVLGLATLFVAYYIHWINKWRDSKFNGVLPPGTMGLPLIGETIQLSRPSDSLDVHPFIQKKVERYGPIFKTCLAGRPVVVSADAEFNNYIMLQEGRAVEMWYLDTLSKFFGLDTEWLKALGLIHKYIRSITLNHFGAEALRERFLPFIEASSMEALHSWSTQPSVEVKNASALMVFRTSVNKMFGEDAKKLSGNIPGKFTKLLGGFLSLPLNFPGTTYHKCLKDMKEIQKKLREVVDDRLANVGPDVEDFLGQALKDKESEKFISEEFIIQLLFSISFASFESISTTLTLILKLLDEHPEVVKELEAEHEAIRKARADPDGPITWEEYKSMTFTLQVINETLRLGSVTPALLRKTVKDLQVKGYIIPEGWTIMLVTASRHRDPKVYKDPHIFNPWRWKDLDSITIQKNFMPFGGGLRHCAGAEYSKVYLCTFLHILCTKYRWTKLGGGRIARAHILSFEDGLHVKFTPKE

SEQ ID NO: 267 - protein, 491 aa, Artificial Sequence
  Synthetic
MKASYLVLIFISIFSMAQAWTVVLGLATLFVAYYIHWINKWRDSKFNGVLPPGTMGLPLIGETIQLSRPSDSLDVHPFIQKKVERYGPIFKTCLAGRPVVVSADAEFNNYIMLQEGRAVEMWYLDTLSKFFGLDTEWLKALGLIHKYIRSITLNHFGAEALRERFLPFIEASSMEALHSWSTQPSVEVKNASALMVFRTSVNKMFGEDAKKLSGNIPGKFTKLLGGFLSLPLNFPGTTYHKCLKDMKEIQKKLREVVDDRLANVGPDVEDFLGQALKDKESEKFISEEFIIQLLFSISFASFESISTTLTLILKLLDEHPEVVKELEAEHEAIRKARADPDGPITWEEYKSMTFTLQVINETLRLGSVTPALLRKTVKDLQVKGYIIPEGWTIMLVTASRHRDPKVYKDPHIFNPWRWKDLDSITIQKNFMPFGGGLRHCAGAEYSKVYLCTFLHILCTKYRWTKLGGGRIARAHILSFEDGLHVKFTPKE

SEQ ID NO: 268 - protein, 478 aa, Artificial Sequence
  Synthetic
MSLYYTWTVVLGLATLFVAYYIHWINKWRDSKFNGVLPPGTMGLPLIGETIQLSRPSDSLDVHPFIQKKVERYGPIFKTCLAGRPVVVSADAEFNNYIMLQEGRAVEMWYLDTLSKFFGLDTEWLKALGLIHKYIRSITLNHFGAEALRERFLPFIEASSMEALHSWSTQPSVEVKNASALMVFRTSVNKMFGEDAKKLSGNIPGKFTKLLGGFLSLPLNFPGTTYHKCLKDMKEIQKKLREVVDDRLANVGPDVEDFLGQALKDKESEKFISEEFIIQLLFSISFASFESISTTLTLILKLLDEHPEVVKELEAEHEAIRKARADPDGPITWEEYKSMTFTLQVINETLRLGSVTPALLRKTVKDLQVKGYIIPEGWTIMLVTASRHRDPKVYKDPHIFNPWRWKDLDSITIQKNFMPFGGGLRHCAGAEYSKVYLCTFLHILCTKYRWTKLGGGRIARAHILSFEDGLHVKFTPKE

SEQ ID NO: 269 - protein, 478 aa, Artificial Sequence
  Synthetic
MLSNTLWTVVLGLATLFVAYYIHWINKWRDSKFNGVLPPGTMGLPLIGETIQLSRPSDSLDVHPFIQKKVERYGPIFKTCLAGRPVVVSADAEFNNYIMLQEGRAVEMWYLDTLSKFFGLDTEWLKALGLIHKYIRSITLNHFGAEALRERFLPFIEASSMEALHSWSTQPSVEVKNASALMVFRTSVNKMFGEDAKKLSGNIPGKFTKLLGGFLSLPLNFPGTTYHKCLKDMKEIQKKLREVVDDRLANVGPDVEDFLGQALKDKESEKFISEEFIIQLLFSISFASFESISTTLTLILKLLDEHPEVVKELEAEHEAIRKARADPDGPITWEEYKSMTFTLQVINETLRLGSVTPALLRKTVKDLQVKGYIIPEGWTIMLVTASRHRDPKVYKDPHIFNPWRWKDLDSITIQKNFMPFGGGLRHCAGAEYSKVYLCTFLHILCTKYRWTKLGGGRIARAHILSFEDGLHVKFTPKE

SEQ ID NO: 270 - protein, 505 aa, Artificial Sequence
  Synthetic
MRVRPKRSVITLMAIVVVMLILRNQFYSSRTRGWTVVLGLATLFVAYYIHWINKWRDSKFNGVLPPGTMGLPLIGETIQLSRPSDSLDVHPFIQKKVERYGPIFKTCLAGRPVVVSADAEFNNYIMLQEGRAVEMWYLDTLSKFFGLDTEWLKALGLIHKYIRSITLNHFGAEALRERFLPFIEASSMEALHSWSTQPSVEVKNASALMVFRTSVNKMFGEDAKKLSGNIPGKFTKLLGGFLSLPLNFPGTTYHKCLKDMKEIQKKLREVVDDRLANVGPDVEDFLGQALKDKESEKFISEEFIIQLLFSISFASFESISTTLTLILKLLDEHPEVVKELEAEHEAIRKARADPDGPITWEEYKSMTFTLQVINETLRLGSVTPALLRKTVKDLQVKGYIIPEGWTIMLVTASRHRDPKVYKDPHIFNPWRWKDLDSITIQKNFMPFGGGLRHCAGAEYSKVYLCTFLHILCTKYRWTKLGGGRIARAHILSFEDGLHVKFTPKE

SEQ ID NO: 271 - protein, 479 aa, Artificial Sequence
  Synthetic
MPFGIDNWTVVLGLATLFVAYYIHWINKWRDSKFNGVLPPGTMGLPLIGETIQLSRPSDSLDVHPFIQKKVERYGPIFKTCLAGRPVVVSADAEFNNYIMLQEGRAVEMWYLDTLSKFFGLDTEWLKALGLIHKYIRSITLNHFGAEALRERFLPFIEASSMEALHSWSTQPSVEVKNASALMVFRTSVNKMFGEDAKKLSGNIPGKFTKLLGGFLSLPLNFPGTTYHKCLKDMKEIQKKLREVVDDRLANVGPDVEDFLGQALKDKESEKFISEEFIIQLLFSISFASFESISTTLTLILKLLDEHPEVVKELEAEHEAIRKARADPDGPITWEEYKSMTFTLQVINETLRLGSVTPALLRKTVKDLQVKGYIIPEGWTIMLVTASRHRDPKVYKDPHIFNPWRWKDLDSITIQKNFMPFGGGLRHCAGAEYSKVYLCTFLHILCTKYRWTKLGGGRIARAHILSFEDGLHVKFTPKE

SEQ ID NO: 272 - protein, 497 aa, Artificial Sequence
  Synthetic
MIKSTIALPSFFIVLILALVNSVAAWTVVLGLATLFVAYYIHWINKWRDSKFNGVLPPGTMGLPLIGETIQLSRPSDSLDVHPFIQKKVERYGPIFKTCLAGRPVVVSADAEFNNYIMLQEGRAVEMWYLDTLSKFFGLDTEWLKALGLIHKYIRSITLNHFGAEALRERFLPFIEASSMEALHSWSTQPSVEVKNASALMVFRTSVNKMFGEDAKKLSGNIPGKFTKLLGGFLSLPLNFPGTTYHKCLKDMKEIQKKLREVVDDRLANVGPDVEDFLGQALKDKESEKFISEEFIIQLLFSISFASFESISTTLTLILKLLDEHPEVVKELEAEHEAIRKARADPDGPITWEEYKSMTFTLQVINETLRLGSVTPALLRKTVKDLQVKGYIIPEGWTIMLVTASRHRDPKVYKDPHIFNPWRWKDLDSITIQKNFMPFGGGLRHCAGAEYSKVYLCTFLHILCTKYRWTKLGGGRIARAHILSFEDGLHVKFTPKE

SEQ ID NO: 273 - protein, 500 aa, Artificial Sequence
  Synthetic
MNFKILLPICALLTLTTFLLTIIATAGSWTVVLGLATLFVAYYIHWINKWRDSKFNGVLPPGTMGLPLIGETIQLSRPSDSLDVHPFIQKKVERYGPIFKTCLAGRPVVVSADAEFNNYIMLQEGRAVEMWYLDTLSKFFGLDTEWLKALGLIHKYIRSITLNHFGAEALRERFLPFIEASSMEALHSWSTQPSVEVKNASALMVFRTSVNKMFGEDAKKLSGNIPGKFTKLLGGFLSLPLNFPGTTYHKCLKDMKEIQKKLREVVDDRLANVGPDVEDFLGQALKDKESEKFISEEFIIQLLFSISFASFESISTTLTLILKLLDEHPEVVKELEAEHEAIRKARADPDGPITWEEYKSMTFTLQVINETLRLGSVTPALLRKTVKDLQVKGYIIPEGWTIMLVTASRHRDPKVYKDPHIFNPWRWKDLDSITIQKNFMPFGGGLRHCAGAEYSKVYLCTFLHILCTKYRWTKLGGGRIARAHILSFEDGLHVKFTPKE

SEQ ID NO: 274 - protein, 494 aa, Artificial Sequence
  Synthetic
MSEVAETWVDTWMAKLVNYDYKWTVVLGLATLFVAYYIHWINKWRDSKFNGVLPPGTMGLPLIGETIQLSRPSDSLDVHPFIQKKVERYGPIFKTCLAGRPVVVSADAEFNNYIMLQEGRAVEMWYLDTLSKFFGLDTEWLKALGLIHKYIRSITLNHFGAEALRERFLPFIEASSMEALHSWSTQPSVEVKNASALMVFRTSVNKMFGEDAKKLSGNIPGKFTKLLGGFLSLPLNFPGTTYHKCLKDMKEIQKKLREVVDDRLANVGPDVEDFLGQALKDKESEKFISEEFIIQLLFSISFASFESISTTLTLILKLLDEHPEVVKELEAEHEAIRKARADPDGPITWEEYKSMTFTLQVINETLRLGSVTPALLRKTVKDLQVKGYIIPEGWTIMLVTASRHRDPKVYKDPHIFNPWRWKDLDSITIQKNFMPFGGGLRHCAGAEYSKVYLCTFLHILCTKYRWTKLGGGRIARAHILSFEDGLHVKFTPKE

SEQ ID NO: 275 - protein, 515 aa, Artificial Sequence
  Synthetic
MSLISILSPLITSEGLDSRIKPSPKKDASTTTKPSLWKTTEFKWTVVLGLATLFVAYYIHWINKWRDSKFNGVLPPGTMGLPLIGETIQLSRPSDSLDVHPFIQKKVERYGPIFKTCLAGRPVVVSADAEFNNYIMLQEGRAVEMWYLDTLSKFFGLDTEWLKALGLIHKYIRSITLNHFGAEALRERFLPFIEASSMEALHSWSTQPSVEVKNASALMVFRTSVNKMFGEDAKKLSGNIPGKFTKLLGGFLSLPLNFPGTTYHKCLKDMKEIQKKLREVVDDRLANVGPDVEDFLGQALKDKESEKFISEEFIIQLLFSISFASFESISTTLTLILKLLDEHPEVVKELEAEHEAIRKARADPDGPITWEEYKSMTFTLQVINETLRLGSVTPALLRKTVKDLQVKGYIIPEGWTIMLVTASRHRDPKVYKDPHIFNPWRWKDLDSITIQKNFMPFGGGLRHCAGAEYSKVYLCTFLHILCTKYRWTKLGGGRIARAHILSFEDGLHVKFTPKE

SEQ ID NO: 276 - protein, 478 aa, Artificial Sequence
  Synthetic
MAIDAQWTVVLGLATLFVAYYIHWINKWRDSKFNGVLPPGTMGLPLIGETIQLSRPSDSLDVHPFIQKKVERYGPIFKTCLAGRPVVVSADAEFNNYIMLQEGRAVEMWYLDTLSKFFGLDTEWLKALGLIHKYIRSITLNHFGAEALRERFLPFIEASSMEALHSWSTQPSVEVKNASALMVFRTSVNKMFGEDAKKLSGNIPGKFTKLLGGFLSLPLNFPGTTYHKCLKDMKEIQKKLREVVDDRLANVGPDVEDFLGQALKDKESEKFISEEFIIQLLFSISFASFESISTTLTLILKLLDEHPEVVKELEAEHEAIRKARADPDGPITWEEYKSMTFTLQVINETLRLGSVTPALLRKTVKDLQVKGYIIPEGWTIMLVTASRHRDPKVYKDPHIFNPWRWKDLDSITIQKNFMPFGGGLRHCAGAEYSKVYLCTFLHILCTKYRWTKLGGGRIARAHILSFEDGLHVKFTPKE

SEQ ID NO: 277 - protein, 504 aa, Artificial Sequence
  Synthetic
MSGFRLIDIVKPILPILPEVELPFEKLPFDDKWTVVLGLATLFVAYYIHWINKWRDSKFNGVLPPGTMGLPLIGETIQLSRPSDSLDVHPFIQKKVERYGPIFKTCLAGRPVVVSADAEFNNYIMLQEGRAVEMWYLDTLSKFFGLDTEWLKALGLIHKYIRSITLNHFGAEALRERFLPFIEASSMEALHSWSTQPSVEVKNASALMVFRTSVNKMFGEDAKKLSGNIPGKFTKLLGGFLSLPLNFPGTTYHKCLKDMKEIQKKLREVVDDRLANVGPDVEDFLGQALKDKESEKFISEEFIIQLLFSISFASFESISTTLTLILKLLDEHPEVVKELEAEHEAIRKARADPDGPITWEEYKSMTFTLQVINETLRLGSVTPALLRKTVKDLQVKGYIIPEGWTIMLVTASRHRDPKVYKDPHIFNPWRWKDLDSITIQKNFMPFGGGLRHCAGAEYSKVYLCTFLHILCTKYRWTKLGGGRIARAHILSFEDGLHVKFTPKE

SEQ ID NO: 278 - protein, 483 aa, Artificial Sequence
  Synthetic
MAFEDYFSFQIWTVVLGLATLFVAYYIHWINKWRDSKFNGVLPPGTMGLPLIGETIQLSRPSDSLDVHPFIQKKVERYGPIFKTCLAGRPVVVSADAEFNNYIMLQEGRAVEMWYLDTLSKFFGLDTEWLKALGLIHKYIRSITLNHFGAEALRERFLPFIEASSMEALHSWSTQPSVEVKNASALMVFRTSVNKMFGEDAKKLSGNIPGKFTKLLGGFLSLPLNFPGTTYHKCLKDMKEIQKKLREVVDDRLANVGPDVEDFLGQALKDKESEKFISEEFIIQLLFSISFASFESISTTLTLILKLLDEHPEVVKELEAEHEAIRKARADPDGPITWEEYKSMTFTLQVINETLRLGSVTPALLRKTVKDLQVKGYIIPEGWTIMLVTASRHRDPKVYKDPHIFNPWRWKDLDSITIQKNFMPFGGGLRHCAGAEYSKVYLCTFLHILCTKYRWTKLGGGRIARAHILSFEDGLHVKFTPKE

SEQ ID NO: 279 - protein, 527 aa, Artificial Sequence
  Synthetic
MSAVFNNATLSGLVQASTYSQTLQNVAHYQPQLNFMEKYWAAWYSYMNNDVLATGWTVVLGLATLFVAYYIHWINKWRDSKFNGVLPPGTMGLPLIGETIQLSRPSDSLDVHPFIQKKVERYGPIFKTCLAGRPVVVSADAEFNNYIMLQEGRAVEMWYLDTLSKFFGLDTEWLKALGLIHKYIRSITLNHFGAEALRERFLPFIEASSMEALHSWSTQPSVEVKNASALMVFRTSVNKMFGEDAKKLSGNIPGKFTKLLGGFLSLPLNFPGTTYHKCLKDMKEIQKKLREVVDDRLANVGPDVEDFLGQALKDKESEKFISEEFIIQLLFSISFASFESISTTLTLILKLLDEHPEVVKELEAEHEAIRKARADPDGPITWEEYKSMTFTLQVINETLRLGSVTPALLRKTVKDLQVKGYIIPEGWTIMLVTASRHRDPKVYKDPHIFNPWRWKDLDSITIQKNFMPFGGGLRHCAGAEYSKVYLCTFLHILCTKYRWTKLGGGRIARAHILSFEDGLHVKFTPKE

SEQ ID NO: 280 - protein, 497 aa, Artificial Sequence
  Synthetic
MSATKSIVGEALEYVNIGLSHFLALPTVVLGLATLFVAYYIHWINKWRDSKFNGVLPPGTMGLPLIGETIQLSRPSDSLDVHPFIQKKVERYGPIFKTCLAGRPVVVSADAEFNNYIMLQEGRAVEMWYLDTLSKFFGLDTEWLKALGLIHKYIRSITLNHFGAEALRERFLPFIEASSMEALHSWSTQPSVEVKNASALMVFRTSVNKMFGEDAKKLSGNIPGKFTKLLGGFLSLPLNFPGTTYHKCLKDMKEIQKKLREVVDDRLANVGPDVEDFLGQALKDKESEKFISEEFIIQLLFSISFASFESISTTLTLILKLLDEHPEVVKELEAEHEAIRKARADPDGPITWEEYKSMTFTLQVINETLRLGSVTPALLRKTVKDLQVKGYIIPEGWTIMLVTASRHRDPKVYKDPHIFNPWRWKDLDSITIQKNFMPFGGGLRHCAGAEYSKVYLCTFLHILCTKYRWTKLGGGRIARAHILSFEDGLHVKFTPKE

SEQ ID NO: 281 - DNA, 1512 bp, Artificial Sequence
  Synthetic
atgaacttgaagcagttcacgtgcctatcatgcgctcaattactcgctattctgctctttatctttgcttttttccctagaaaaatcgtgctgacatggactgtcgtgctcggtttggcgacgctgtttgtcgcctactacatccattggattaacaaatggagagattccaagttcaacggagttctgccgccgggcaccatgggtttgccgctcatcggagaaacgattcaactgagtcgacccagtgactccctcgacgttcaccctttcatccagaaaaaagttgaaagatacgggccgatcttcaaaacatgtctggccggaaggccggtggtggtgtcggcggacgcagagttcaacaactacataatgctgcaggaaggaagagcagtggaaatgtggtatttggatacgctctccaaatttttcggcctcgacaccgagtggctcaaagctctgggcctcatccacaagtacatcagaagcattactctcaatcacttcggcgccgaggccctgcgggagagatttcttccttttattgaagcatcctccatggaagcccttcactcctggtctactcaacctagcgtcgaagtcaaaaatgcctccgctctcatggtttttaggacctcggtgaataagatgttcggtgaggatgcgaagaagctatcgggaaatatccctgggaagttcacgaagcttctaggaggatttctcagtttaccactgaattttcccggcaccacctaccacaaatgcttgaaggatatgaaggaaatccagaagaagctaagagaggttgtagacgatagattggctaatgtgggccctgatgtggaagatttcttggggcaagcccttaaagataaggaatcagagaagttcatttcagaggagttcatcatccaactgttgttttctatcagttttgctagctttgagtccatctccaccactcttactttgattctcaagctccttgatgaacacccagaagtagtgaaagagttggaagctgaacacgaggcgattcgaaaagctagagcagatccagatggaccaattacttgggaagaatacaaatccatgacttttacattacaagtcatcaatgaaaccctaaggttggggagtgtcacacctgccttgttgaggaaaacagttaaagatcttcaagtaaaaggatacataatcccggaaggatggacaataatgcttgtcaccgcttcacgtcacagagatccaaaagtctataaggaccctcatatcttcaatccatggcgttggaaggacttggactcaattaccatccaaaagaacttcatgccttttgggggaggcttaaggcattgtgctggtgctgagtactctaaagtctacttgtgcaccttcttgcacatcctctgtaccaaataccgatggaccaaacttgggggaggaaggattgcaagagctcatatattgagttttgaagatgggttacatgtgaagttcacgccaaaagaa

SEQ ID NO: 282 - DNA, 1503 bp, Artificial Sequence
  Synthetic
atgataccttccaataagagaaatgctagaattttaagcattacaacgctattattgttgttagtgtttttcgtagcgcaaaatgcgtggactgtcgtgctcggtttggcgacgctgtttgtcgcctactacatccattggattaacaaatggagagattccaagttcaacggagttctgccgccgggcaccatgggtttgccgctcatcggagaaacgattcaactgagtcgacccagtgactccctcgacgttcaccctttcatccagaaaaaagttgaaagatacgggccgatcttcaaaacatgtctggccggaaggccggtggtggtgtcggcggacgcagagttcaacaactacataatgctgcaggaaggaagagcagtggaaatgtggtatttggatacgctctccaaatttttcggcctcgacaccgagtggctcaaagctctgggcctcatccacaagtacatcagaagcattactctcaatcacttcggcgccgaggccctgcgggagagatttcttccttttattgaagcatcctccatggaagcccttcactcctggtctactcaacctagcgtcgaagtcaaaaatgcctccgctctcatggtttttaggacctcggtgaataagatgttcggtgaggatgcgaagaagctatcgggaaatatccctgggaagttcacgaagcttctaggaggatttctcagtttaccactgaattttcccggcaccacctaccacaaatgcttgaaggatatgaaggaaatccagaagaagctaagagaggttgtagacgatagattggctaatgtgggccctgatgtggaagatttcttggggcaagcccttaaagataaggaatcagagaagttcatttcagaggagttcatcatccaactgttgttttctatcagttttgctagctttgagtccatctccaccactcttactttgattctcaagctccttgatgaacacccagaagtagtgaaagagttggaagctgaacacgaggcgattcgaaaagctagagcagatccagatggaccaattacttgggaagaatacaaatccatgacttttacattacaagtcatcaatgaaaccctaaggttggggagtgtcacacctgccttgttgaggaaaacagttaaagatcttcaagtaaaaggatacataatcccggaaggatggacaataatgcttgtcaccgcttcacgtcacagagatccaaaagtctataaggaccctcatatcttcaatccatggcgttggaaggacttggactcaattaccatccaaaagaacttcatgccttttgggggaggcttaaggcattgtgctggtgctgagtactctaaagtctacttgtgcaccttcttgcacatcctctgtaccaaataccgatggaccaaacttgggggaggaaggattgcaagagctcatatattgagttttgaagatgggttacatgtgaagttcacgccaaaagaa

SEQ ID NO: 283 - DNA, 1473 bp, Artificial Sequence
  Synthetic
atgacttttatgcaacagcttcaagaggctggggaaagatttaggtgtatcaatggttggactgtcgtgctcggtttggcgacgctgtttgtcgcctactacatccattggattaacaaatggagagattccaagttcaacggagttctgccgccgggcaccatgggtttgccgctcatcggagaaacgattcaactgagtcgacccagtgactccctcgacgttcaccctttcatccagaaaaaagttgaaagatacgggccgatcttcaaaacatgtctggccggaaggccggtggtggtgtcggcggacgcagagttcaacaactacataatgctgcaggaaggaagagcagtggaaatgtggtatttggatacgctctccaaatttttcggcctcgacaccgagtggctcaaagctctgggcctcatccacaagtacatcagaagcattactctcaatcacttcggcgccgaggccctgcgggagagatttcttccttttattgaagcatcctccatggaagcccttcactcctggtctactcaacctagcgtcgaagtcaaaaatgcctccgctctcatggtttttaggacctcggtgaataagatgttcggtgaggatgcgaagaagctatcgggaaatatccctgggaagttcacgaagcttctaggaggatttctcagtttaccactgaattttcccggcaccacctaccacaaatgcttgaaggatatgaaggaaatccagaagaagctaagagaggttgtagacgatagattggctaatgtgggccctgatgtggaagatttcttggggcaagcccttaaagataaggaatcagagaagttcatttcagaggagttcatcatccaactgttgttttctatcagttttgctagctttgagtccatctccaccactcttactttgattctcaagctccttgatgaacacccagaagtagtgaaagagttggaagctgaacacgaggcgattcgaaaagctagagcagatccagatggaccaattacttgggaagaatacaaatccatgacttttacattacaagtcatcaatgaaaccctaaggttggggagtgtcacacctgccttgttgaggaaaacagttaaagatcttcaagtaaaaggatacataatcccggaaggatggacaataatgcttgtcaccgcttcacgtcacagagatccaaaagtctataaggaccctcatatcttcaatccatggcgttggaaggacttggactcaattaccatccaaaagaacttcatgccttttgggggaggcttaaggcattgtgctggtgctgagtactctaaagtctacttgtgcaccttcttgcacatcctctgtaccaaataccgatggaccaaacttgggggaggaaggattgcaagagctcatatattgagttttgaagatgggttacatgtgaagttcacgccaaaagaa

SEQ ID NO: 284 - DNA, 1599 bp, Artificial Sequence
  Synthetic
atgctatccaaggtattgctgaatatagctttcaaggtgctgttaaccaccgccaagagagcagttgatcctgacgatgatgatgaacttctaccttccccggatctcccgggtagcgatgaccctattgcaggtgatcctgatgtagacttaaaccctgttacagaagaaatgttctcttcatggactgtcgtgctcggtttggcgacgctgtttgtcgcctactacatccattggattaacaaatggagagattccaagttcaacggagttctgccgccgggcaccatgggtttgccgctcatcggagaaacgattcaactgagtcgacccagtgactccctcgacgttcaccctttcatccagaaaaaagttgaaagatacgggccgatcttcaaaacatgtctggccggaaggccggtggtggtgtcggcggacgcagagttcaacaactacataatgctgcaggaaggaagagcagtggaaatgtggtatttggatacgctctccaaatttttcggcctcgacaccgagtggctcaaagctctgggcctcatccacaagtacatcagaagcattactctcaatcacttcggcgccgaggccctgcgggagagatttcttccttttattgaagcatcctccatggaagcccttcactcctggtctactcaacctagcgtcgaagtcaaaaatgcctccgctctcatggtttttaggacctcggtgaataagatgttcggtgaggatgcgaagaagctatcgggaaatatccctgggaagttcacgaagcttctaggaggatttctcagtttaccactgaattttcccggcaccacctaccacaaatgcttgaaggatatgaaggaaatccagaagaagctaagagaggttgtagacgatagattggctaatgtgggccctgatgtggaagatttcttggggcaagcccttaaagataaggaatcagagaagttcatttcagaggagttcatcatccaactgttgttttctatcagttttgctagctttgagtccatctccaccactcttactttgattctcaagctccttgatgaacacccagaagtagtgaaagagttggaagctgaacacgaggcgattcgaaaagctagagcagatccagatggaccaattacttgggaagaatacaaatccatgacttttacattacaagtcatcaatgaaaccctaaggttggggagtgtcacacctgccttgttgaggaaaacagttaaagatcttcaagtaaaaggatacataatcccggaaggatggacaataatgcttgtcaccgcttcacgtcacagagatccaaaagtctataaggaccctcatatcttcaatccatggcgttggaaggacttggactcaattaccatccaaaagaacttcatgccttttgggggaggcttaaggcattgtgctggtgctgagtactctaaagtctacttgtgcaccttcttgcacatcctctgtaccaaataccgatggaccaaacttgggggaggaaggattgcaagagctcatatattgagttttgaagatgggttacatgtgaagttcacgccaaaagaa

SEQ ID NO: 285 - DNA, 1440 bp, Artificial Sequence
  Synthetic
atgaacgtaacatcgaatgcaacttggactgtcgtgctcggtttggcgacgctgtttgtcgcctactacatccattggattaacaaatggagagattccaagttcaacggagttctgccgccgggcaccatgggtttgccgctcatcggagaaacgattcaactgagtcgacccagtgactccctcgacgttcaccctttcatccagaaaaaagttgaaagatacgggccgatcttcaaaacatgtctggccggaaggccggtggtggtgtcggcggacgcagagttcaacaactacataatgctgcaggaaggaagagcagtggaaatgtggtatttggatacgctctccaaatttttcggcctcgacaccgagtggctcaaagctctgggcctcatccacaagtacatcagaagcattactctcaatcacttcggcgccgaggccctgcgggagagatttcttccttttattgaagcatcctccatggaagcccttcactcctggtctactcaacctagcgtcgaagtcaaaaatgcctccgctctcatggtttttaggacctcggtgaataagatgttcggtgaggatgcgaagaagctatcgggaaatatccctgggaagttcacgaagcttctaggaggatttctcagtttaccactgaattttcccggcaccacctaccacaaatgcttgaaggatatgaaggaaatccagaagaagctaagagaggttgtagacgatagattggctaatgtgggccctgatgtggaagatttcttggggcaagcccttaaagataaggaatcagagaagttcatttcagaggagttcatcatccaactgttgttttctatcagttttgctagctttgagtccatctccaccactcttactttgattctcaagctccttgatgaacacccagaagtagtgaaagagttggaagctgaacacgaggcgattcgaaaagctagagcagatccagatggaccaattacttgggaagaatacaaatccatgacttttacattacaagtcatcaatgaaaccctaaggttggggagtgtcacacctgccttgttgaggaaaacagttaaagatcttcaagtaaaaggatacataatcccggaaggatggacaataatgcttgtcaccgcttcacgtcacagagatccaaaagtctataaggaccctcatatcttcaatccatggcgttggaaggacttggactcaattaccatccaaaagaacttcatgccttttgggggaggcttaaggcattgtgctggtgctgagtactctaaagtctacttgtgcaccttcttgcacatcctctgtaccaaataccgatggaccaaacttgggggaggaaggattgcaagagctcatatattgagttttgaagatgggttacatgtgaagttcacgccaaaagaa

SEQ ID NO: 286 - DNA, 1488 bp, Artificial Sequence
  Synthetic
atgaatgtcatattttctttggcgagtttcgtcaaaaacatgtataatgcaagtttgaaccaacgtaatctatggactgtcgtgctcggtttggcgacgctgtttgtcgcctactacatccattggattaacaaatggagagattccaagttcaacggagttctgccgccgggcaccatgggtttgccgctcatcggagaaacgattcaactgagtcgacccagtgactccctcgacgttcaccctttcatccagaaaaaagttgaaagatacgggccgatcttcaaaacatgtctggccggaaggccggtggtggtgtcggcggacgcagagttcaacaactacataatgctgcaggaaggaagagcagtggaaatgtggtatttggatacgctctccaaatttttcggcctcgacaccgagtggctcaaagctctgggcctcatccacaagtacatcagaagcattactctcaatcacttcggcgccgaggccctgcgggagagatttcttccttttattgaagcatcctccatggaagcccttcactcctggtctactcaacctagcgtcgaagtcaaaaatgcctccgctctcatggtttttaggacctcggtgaataagatgttcggtgaggatgcgaagaagctatcgggaaatatccctgggaagttcacgaagcttctaggaggatttctcagtttaccactgaattttcccggcaccacctaccacaaatgcttgaaggatatgaaggaaatccagaagaagctaagagaggttgtagacgatagattggctaatgtgggccctgatgtggaagatttcttggggcaagcccttaaagataaggaatcagagaagttcatttcagaggagttcatcatccaactgttgttttctatcagttttgctagctttgagtccatctccaccactcttactttgattctcaagctccttgatgaacacccagaagtagtgaaagagttggaagctgaacacgaggcgattcgaaaagctagagcagatccagatggaccaattacttgggaagaatacaaatccatgacttttacattacaagtcatcaatgaaaccctaaggttggggagtgtcacacctgccttgttgaggaaaacagttaaagatcttcaagtaaaaggatacataatcccggaaggatggacaataatgcttgtcaccgcttcacgtcacagagatccaaaagtctataaggaccctcatatcttcaatccatggcgttggaaggacttggactcaattaccatccaaaagaacttcatgccttttgggggaggcttaaggcattgtgctggtgctgagtactctaaagtctacttgtgcaccttcttgcacatcctctgtaccaaataccgatggaccaaacttgggggaggaaggattgcaagagctcatatattgagttttgaagatgggttacatgtgaagttcacgccaaaagaa

SEQ ID NO: 287 - DNA, 1464 bp, Artificial Sequence
  Synthetic
atgaattggaagtcgtacgtttttcccggtggtcatccaccagctgcgtggactgtcgtgctcggtttggcgacgctgtttgtcgcctactacatccattggattaacaaatggagagattccaagttcaacggagttctgccgccgggcaccatgggtttgccgctcatcggagaaacgattcaactgagtcgacccagtgactccctcgacgttcaccctttcatccagaaaaaagttgaaagatacgggccgatcttcaaaacatgtctggccggaaggccggtggtggtgtcggcggacgcagagttcaacaactacataatgctgcaggaaggaagagcagtggaaatgtggtatttggatacgctctccaaatttttcggcctcgacaccgagtggctcaaagctctgggcctcatccacaagtacatcagaagcattactctcaatcacttcggcgccgaggccctgcgggagagatttcttccttttattgaagcatcctccatggaagcccttcactcctggtctactcaacctagcgtcgaagtcaaaaatgcctccgctctcatggtttttaggacctcggtgaataagatgttcggtgaggatgcgaagaagctatcgggaaatatccctgggaagttcacgaagcttctaggaggatttctcagtttaccactgaattttcccggcaccacctaccacaaatgcttgaaggatatgaaggaaatccagaagaagctaagagaggttgtagacgatagattggctaatgtgggccctgatgtggaagatttcttggggcaagcccttaaagataaggaatcagagaagttcatttcagaggagttcatcatccaactgttgttttctatcagttttgctagctttgagtccatctccaccactcttactttgattctcaagctccttgatgaacacccagaagtagtgaaagagttggaagctgaacacgaggcgattcgaaaagctagagcagatccagatggaccaattacttgggaagaatacaaatccatgacttttacattacaagtcatcaatgaaaccctaaggttggggagtgtcacacctgccttgttgaggaaaacagttaaagatcttcaagtaaaaggatacataatcccggaaggatggacaataatgcttgtcaccgcttcacgtcacagagatccaaaagtctataaggaccctcatatcttcaatccatggcgttggaaggacttggactcaattaccatccaaaagaacttcatgccttttgggggaggcttaaggcattgtgctggtgctgagtactctaaagtctacttgtgcaccttcttgcacatcctctgtaccaaataccgatggaccaaacttgggggaggaaggattgcaagagctcatatattgagttttgaagatgggttacatgtgaagttcacgccaaaagaa

SEQ ID NO: 288 - DNA, 1542 bp, Artificial Sequence
  Synthetic
atgtttttcaacagactaagcgctggcaagctgctggtaccactctccgtggtcctgtacgcccttttcgtggtaatattacctttacagaatagtttccactcctccaatgttttagttagaggttggactgtcgtgctcggtttggcgacgctgtttgtcgcctactacatccattggattaacaaatggagagattccaagttcaacggagttctgccgccgggcaccatgggtttgccgctcatcggagaaacgattcaactgagtcgacccagtgactccctcgacgttcaccctttcatccagaaaaaagttgaaagatacgggccgatcttcaaaacatgtctggccggaaggccggtggtggtgtcggcggacgcagagttcaacaactacataatgctgcaggaaggaagagcagtggaaatgtggtatttggatacgctctccaaatttttcggcctcgacaccgagtggctcaaagctctgggcctcatccacaagtacatcagaagcattactctcaatcacttcggcgccgaggccctgcgggagagatttcttccttttattgaagcatcctccatggaagcccttcactcctggtctactcaacctagcgtcgaagtcaaaaatgcctccgctctcatggtttttaggacctcggtgaataagatgttcggtgaggatgcgaagaagctatcgggaaatatccctgggaagttcacgaagcttctaggaggatttctcagtttaccactgaattttcccggcaccacctaccacaaatgcttgaaggatatgaaggaaatccagaagaagctaagagaggttgtagacgatagattggctaatgtgggccctgatgtggaagatttcttggggcaagcccttaaagataaggaatcagagaagttcatttcagaggagttcatcatccaactgttgttttctatcagttttgctagctttgagtccatctccaccactcttactttgattctcaagctccttgatgaacacccagaagtagtgaaagagttggaagctgaacacgaggcgattcgaaaagctagagcagatccagatggaccaattacttgggaagaatacaaatccatgacttttacattacaagtcatcaatgaaaccctaaggttggggagtgtcacacctgccttgttgaggaaaacagttaaagatcttcaagtaaaaggatacataatcccggaaggatggacaataatgcttgtcaccgcttcacgtcacagagatccaaaagtctataaggaccctcatatcttcaatccatggcgttggaaggacttggactcaattaccatccaaaagaacttcatgccttttgggggaggcttaaggcattgtgctggtgctgagtactctaaagtctacttgtgcaccttcttgcacatcctctgtaccaaataccgatggaccaaacttgggggaggaaggattgcaagagctcatatattgagttttgaagatgggttacatgtgaagttcacgccaaaagaa

SEQ ID NO: 289 - DNA, 1527 bp, Artificial Sequence
  Synthetic
atgagttctgctaaacctattaatgtatattcaatcccggagttgaaccaagctttagatgaagccctaccttctgttttcgcgagattaaattacgagagatcatacgcttggactgtcgtgctcggtttggcgacgctgtttgtcgcctactacatccattggattaacaaatggagagattccaagttcaacggagttctgccgccgggcaccatgggtttgccgctcatcggagaaacgattcaactgagtcgacccagtgactccctcgacgttcaccctttcatccagaaaaaagttgaaagatacgggccgatcttcaaaacatgtctggccggaaggccggtggtggtgtcggcggacgcagagttcaacaactacataatgctgcaggaaggaagagcagtggaaatgtggtatttggatacgctctccaaatttttcggcctcgacaccgagtggctcaaagctctgggcctcatccacaagtacatcagaagcattactctcaatcacttcggcgccgaggccctgcgggagagatttcttccttttattgaagcatcctccatggaagcccttcactcctggtctactcaacctagcgtcgaagtcaaaaatgcctccgctctcatggtttttaggacctcggtgaataagatgttcggtgaggatgcgaagaagctatcgggaaatatccctgggaagttcacgaagcttctaggaggatttctcagtttaccactgaattttcccggcaccacctaccacaaatgcttgaaggatatgaaggaaatccagaagaagctaagagaggttgtagacgatagattggctaatgtgggccctgatgtggaagatttcttggggcaagcccttaaagataaggaatcagagaagttcatttcagaggagttcatcatccaactgttgttttctatcagttttgctagctttgagtccatctccaccactcttactttgattctcaagctccttgatgaacacccagaagtagtgaaagagttggaagctgaacacgaggcgattcgaaaagctagagcagatccagatggaccaattacttgggaagaatacaaatccatgacttttacattacaagtcatcaatgaaaccctaaggttggggagtgtcacacctgccttgttgaggaaaacagttaaagatcttcaagtaaaaggatacataatcccggaaggatggacaataatgcttgtcaccgcttcacgtcacagagatccaaaagtctataaggaccctcatatcttcaatccatggcgttggaaggacttggactcaattaccatccaaaagaacttcatgccttttgggggaggcttaaggcattgtgctggtgctgagtactctaaagtctacttgtgcaccttcttgcacatcctctgtaccaaataccgatggaccaaacttgggggaggaaggattgcaagagctcatatattgagttttgaagatgggttacatgtgaagttcacgccaaaagaa

SEQ ID NO: 290 - DNA, 1464 bp, Artificial Sequence
  Synthetic
atggacagagatcatattaatgaccatgaccatcgaatgagctattcctggactgtcgtgctcggtttggcgacgctgtttgtcgcctactacatccattggattaacaaatggagagattccaagttcaacggagttctgccgccgggcaccatgggtttgccgctcatcggagaaacgattcaactgagtcgacccagtgactccctcgacgttcaccctttcatccagaaaaaagttgaaagatacgggccgatcttcaaaacatgtctggccggaaggccggtggtggtgtcggcggacgcagagttcaacaactacataatgctgcaggaaggaagagcagtggaaatgtggtatttggatacgctctccaaatttttcggcctcgacaccgagtggctcaaagctctgggcctcatccacaagtacatcagaagcattactctcaatcacttcggcgccgaggccctgcgggagagatttcttccttttattgaagcatcctccatggaagcccttcactcctggtctactcaacctagcgtcgaagtcaaaaatgcctccgctctcatggtttttaggacctcggtgaataagatgttcggtgaggatgcgaagaagctatcgggaaatatccctgggaagttcacgaagcttctaggaggatttctcagtttaccactgaattttcccggcaccacctaccacaaatgcttgaaggatatgaaggaaatccagaagaagctaagagaggttgtagacgatagattggctaatgtgggccctgatgtggaagatttcttggggcaagcccttaaagataaggaatcagagaagttcatttcagaggagttcatcatccaactgttgttttctatcagttttgctagctttgagtccatctccaccactcttactttgattctcaagctccttgatgaacacccagaagtagtgaaagagttggaagctgaacacgaggcgattcgaaaagctagagcagatccagatggaccaattacttgggaagaatacaaatccatgacttttacattacaagtcatcaatgaaaccctaaggttggggagtgtcacacctgccttgttgaggaaaacagttaaagatcttcaagtaaaaggatacataatcccggaaggatggacaataatgcttgtcaccgcttcacgtcacagagatccaaaagtctataaggaccctcatatcttcaatccatggcgttggaaggacttggactcaattaccatccaaaagaacttcatgccttttgggggaggcttaaggcattgtgctggtgctgagtactctaaagtctacttgtgcaccttcttgcacatcctctgtaccaaataccgatggaccaaacttgggggaggaaggattgcaagagctcatatattgagttttgaagatgggttacatgtgaagttcacgccaaaagaa

SEQ ID NO: 291 - DNA, 1473 bp, Artificial Sequence
  Synthetic
atgaaggccagttacttagttttgattttcattagcatattctccatggcacaggcatggactgtcgtgctcggtttggcgacgctgtttgtcgcctactacatccattggattaacaaatggagagattccaagttcaacggagttctgccgccgggcaccatgggtttgccgctcatcggagaaacgattcaactgagtcgacccagtgactccctcgacgttcaccctttcatccagaaaaaagttgaaagatacgggccgatcttcaaaacatgtctggccggaaggccggtggtggtgtcggcggacgcagagttcaacaactacataatgctgcaggaaggaagagcagtggaaatgtggtatttggatacgctctccaaatttttcggcctcgacaccgagtggctcaaagctctgggcctcatccacaagtacatcagaagcattactctcaatcacttcggcgccgaggccctgcgggagagatttcttccttttattgaagcatcctccatggaagcccttcactcctggtctactcaacctagcgtcgaagtcaaaaatgcctccgctctcatggtttttaggacctcggtgaataagatgttcggtgaggatgcgaagaagctatcgggaaatatccctgggaagttcacgaagcttctaggaggatttctcagtttaccactgaattttcccggcaccacctaccacaaatgcttgaaggatatgaaggaaatccagaagaagctaagagaggttgtagacgatagattggctaatgtgggccctgatgtggaagatttcttggggcaagcccttaaagataaggaatcagagaagttcatttcagaggagttcatcatccaactgttgttttctatcagttttgctagctttgagtccatctccaccactcttactttgattctcaagctccttgatgaacacccagaagtagtgaaagagttggaagctgaacacgaggcgattcgaaaagctagagcagatccagatggaccaattacttgggaagaatacaaatccatgacttttacattacaagtcatcaatgaaaccctaaggttggggagtgtcacacctgccttgttgaggaaaacagttaaagatcttcaagtaaaaggatacataatcccggaaggatggacaataatgcttgtcaccgcttcacgtcacagagatccaaaagtctataaggaccctcatatcttcaatccatggcgttggaaggacttggactcaattaccatccaaaagaacttcatgccttttgggggaggcttaaggcattgtgctggtgctgagtactctaaagtctacttgtgcaccttcttgcacatcctctgtaccaaataccgatggaccaaacttgggggaggaaggattgcaagagctcatatattgagttttgaagatgggttacatgtgaagttcacgccaaaagaa

SEQ ID NO: 292 - DNA, 1434 bp, Artificial Sequence
  Synthetic
atgtcattatattacacctggactgtcgtgctcggtttggcgacgctgtttgtcgcctactacatccattggattaacaaatggagagattccaagttcaacggagttctgccgccgggcaccatgggtttgccgctcatcggagaaacgattcaactgagtcgacccagtgactccctcgacgttcaccctttcatccagaaaaaagttgaaagatacgggccgatcttcaaaacatgtctggccggaaggccggtggtggtgtcggcggacgcagagttcaacaactacataatgctgcaggaaggaagagcagtggaaatgtggtatttggatacgctctccaaatttttcggcctcgacaccgagtggctcaaagctctgggcctcatccacaagtacatcagaagcattactctcaatcacttcggcgccgaggccctgcgggagagatttcttccttttattgaagcatcctccatggaagcccttcactcctggtctactcaacctagcgtcgaagtcaaaaatgcctccgctctcatggtttttaggacctcggtgaataagatgttcggtgaggatgcgaagaagctatcgggaaatatccctgggaagttcacgaagcttctaggaggatttctcagtttaccactgaattttcccggcaccacctaccacaaatgcttgaaggatatgaaggaaatccagaagaagctaagagaggttgtagacgatagattggctaatgtgggccctgatgtggaagatttcttggggcaagcccttaaagataaggaatcagagaagttcatttcagaggagttcatcatccaactgttgttttctatcagttttgctagctttgagtccatctccaccactcttactttgattctcaagctccttgatgaacacccagaagtagtgaaagagttggaagctgaacacgaggcgattcgaaaagctagagcagatccagatggaccaattacttgggaagaatacaaatccatgacttttacattacaagtcatcaatgaaaccctaaggttggggagtgtcacacctgccttgttgaggaaaacagttaaagatcttcaagtaaaaggatacataatcccggaaggatggacaataatgcttgtcaccgcttcacgtcacagagatccaaaagtctataaggaccctcatatcttcaatccatggcgttggaaggacttggactcaattaccatccaaaagaacttcatgccttttgggggaggcttaaggcattgtgctggtgctgagtactctaaagtctacttgtgcaccttcttgcacatcctctgtaccaaataccgatggaccaaacttgggggaggaaggattgcaagagctcatatattgagttttgaagatgggttacatgtgaagttcacgccaaaagaa

SEQ ID NO: 293 - DNA, 1434 bp, Artificial Sequence
  Synthetic
atgcttagtaatacactttggactgtcgtgctcggtttggcgacgctgtttgtcgcctactacatccattggattaacaaatggagagattccaagttcaacggagttctgccgccgggcaccatgggtttgccgctcatcggagaaacgattcaactgagtcgacccagtgactccctcgacgttcaccctttcatccagaaaaaagttgaaagatacgggccgatcttcaaaacatgtctggccggaaggccggtggtggtgtcggcggacgcagagttcaacaactacataatgctgcaggaaggaagagcagtggaaatgtggtatttggatacgctctccaaatttttcggcctcgacaccgagtggctcaaagctctgggcctcatccacaagtacatcagaagcattactctcaatcacttcggcgccgaggccctgcgggagagatttcttccttttattgaagcatcctccatggaagcccttcactcctggtctactcaacctagcgtcgaagtcaaaaatgcctccgctctcatggtttttaggacctcggtgaataagatgttcggtgaggatgcgaagaagctatcgggaaatatccctgggaagttcacgaagcttctaggaggatttctcagtttaccactgaattttcccggcaccacctaccacaaatgcttgaaggatatgaaggaaatccagaagaagctaagagaggttgtagacgatagattggctaatgtgggccctgatgtggaagatttcttggggcaagcccttaaagataaggaatcagagaagttcatttcagaggagttcatcatccaactgttgttttctatcagttttgctagctttgagtccatctccaccactcttactttgattctcaagctccttgatgaacacccagaagtagtgaaagagttggaagctgaacacgaggcgattcgaaaagctagagcagatccagatggaccaattacttgggaagaatacaaatccatgacttttacattacaagtcatcaatgaaaccctaaggttggggagtgtcacacctgccttgttgaggaaaacagttaaagatcttcaagtaaaaggatacataatcccggaaggatggacaataatgcttgtcaccgcttcacgtcacagagatccaaaagtctataaggaccctcatatcttcaatccatggcgttggaaggacttggactcaattaccatccaaaagaacttcatgccttttgggggaggcttaaggcattgtgctggtgctgagtactctaaagtctacttgtgcaccttcttgcacatcctctgtaccaaataccgatggaccaaacttgggggaggaaggattgcaagagctcatatattgagttttgaagatgggttacatgtgaagttcacgccaaaagaa

SEQ ID NO: 294 - DNA, 1515 bp, Artificial Sequence
  Synthetic
atgagagtaagaccaaagaggtcggtcataacactcatggcgatagtagtcgtgatgctcatcctcagaaaccagttctactcatcacgaacgcgagggtggactgtcgtgctcggtttggcgacgctgtttgtcgcctactacatccattggattaacaaatggagagattccaagttcaacggagttctgccgccgggcaccatgggtttgccgctcatcggagaaacgattcaactgagtcgacccagtgactccctcgacgttcaccctttcatccagaaaaaagttgaaagatacgggccgatcttcaaaacatgtctggccggaaggccggtggtggtgtcggcggacgcagagttcaacaactacataatgctgcaggaaggaagagcagtggaaatgtggtatttggatacgctctccaaatttttcggcctcgacaccgagtggctcaaagctctgggcctcatccacaagtacatcagaagcattactctcaatcacttcggcgccgaggccctgcgggagagatttcttccttttattgaagcatcctccatggaagcccttcactcctggtctactcaacctagcgtcgaagtcaaaaatgcctccgctctcatggtttttaggacctcggtgaataagatgttcggtgaggatgcgaagaagctatcgggaaatatccctgggaagttcacgaagcttctaggaggatttctcagtttaccactgaattttcccggcaccacctaccacaaatgcttgaaggatatgaaggaaatccagaagaagctaagagaggttgtagacgatagattggctaatgtgggccctgatgtggaagatttcttggggcaagcccttaaagataaggaatcagagaagttcatttcagaggagttcatcatccaactgttgttttctatcagttttgctagctttgagtccatctccaccactcttactttgattctcaagctccttgatgaacacccagaagtagtgaaagagttggaagctgaacacgaggcgattcgaaaagctagagcagatccagatggaccaattacttgggaagaatacaaatccatgacttttacattacaagtcatcaatgaaaccctaaggttggggagtgtcacacctgccttgttgaggaaaacagttaaagatcttcaagtaaaaggatacataatcccggaaggatggacaataatgcttgtcaccgcttcacgtcacagagatccaaaagtctataaggaccctcatatcttcaatccatggcgttggaaggacttggactcaattaccatccaaaagaacttcatgccttttgggggaggcttaaggcattgtgctggtgctgagtactctaaagtctacttgtgcaccttcttgcacatcctctgtaccaaataccgatggaccaaacttgggggaggaaggattgcaagagctcatatattgagttttgaagatgggttacatgtgaagttcacgccaaaagaa

SEQ ID NO: 295 - DNA, 1437 bp, Artificial Sequence
  Synthetic
atgccgtttggaatagacaactggactgtcgtgctcggtttggcgacgctgtttgtcgcctactacatccattggattaacaaatggagagattccaagttcaacggagttctgccgccgggcaccatgggtttgccgctcatcggagaaacgattcaactgagtcgacccagtgactccctcgacgttcaccctttcatccagaaaaaagttgaaagatacgggccgatcttcaaaacatgtctggccggaaggccggtggtggtgtcggcggacgcagagttcaacaactacataatgctgcaggaaggaagagcagtggaaatgtggtatttggatacgctctccaaatttttcggcctcgacaccgagtggctcaaagctctgggcctcatccacaagtacatcagaagcattactctcaatcacttcggcgccgaggccctgcgggagagatttcttccttttattgaagcatcctccatggaagcccttcactcctggtctactcaacctagcgtcgaagtcaaaaatgcctccgctctcatggtttttaggacctcggtgaataagatgttcggtgaggatgcgaagaagctatcgggaaatatccctgggaagttcacgaagcttctaggaggatttctcagtttaccactgaattttcccggcaccacctaccacaaatgcttgaaggatatgaaggaaatccagaagaagctaagagaggttgtagacgatagattggctaatgtgggccctgatgtggaagatttcttggggcaagcccttaaagataaggaatcagagaagttcatttcagaggagttcatcatccaactgttgttttctatcagttttgctagctttgagtccatctccaccactcttactttgattctcaagctccttgatgaacacccagaagtagtgaaagagttggaagctgaacacgaggcgattcgaaaagctagagcagatccagatggaccaattacttgggaagaatacaaatccatgacttttacattacaagtcatcaatgaaaccctaaggttggggagtgtcacacctgccttgttgaggaaaacagttaaagatcttcaagtaaaaggatacataatcccggaaggatggacaataatgcttgtcaccgcttcacgtcacagagatccaaaagtctataaggaccctcatatcttcaatccatggcgttggaaggacttggactcaattaccatccaaaagaacttcatgccttttgggggaggcttaaggcattgtgctggtgctgagtactctaaagtctacttgtgcaccttcttgcacatcctctgtaccaaataccgatggaccaaacttgggggaggaaggattgcaagagctcatatattgagttttgaagatgggttacatgtgaagttcacgccaaaagaa

SEQ ID NO: 296 - DNA, 1491 bp, Artificial Sequence
  Synthetic
atgatcaaatctacaattgctctaccctctttcttcattgttttaattttggcgttggtcaattcagtggctgcatggactgtcgtgctcggtttggcgacgctgtttgtcgcctactacatccattggattaacaaatggagagattccaagttcaacggagttctgccgccgggcaccatgggtttgccgctcatcggagaaacgattcaactgagtcgacccagtgactccctcgacgttcaccctttcatccagaaaaaagttgaaagatacgggccgatcttcaaaacatgtctggccggaaggccggtggtggtgtcggcggacgcagagttcaacaactacataatgctgcaggaaggaagagcagtggaaatgtggtatttggatacgctctccaaatttttcggcctcgacaccgagtggctcaaagctctgggcctcatccacaagtacatcagaagcattactctcaatcacttcggcgccgaggccctgcgggagagatttcttccttttattgaagcatcctccatggaagcccttcactcctggtctactcaacctagcgtcgaagtcaaaaatgcctccgctctcatggtttttaggacctcggtgaataagatgttcggtgaggatgcgaagaagctatcgggaaatatccctgggaagttcacgaagcttctaggaggatttctcagtttaccactgaattttcccggcaccacctaccacaaatgcttgaaggatatgaaggaaatccagaagaagctaagagaggttgtagacgatagattggctaatgtgggccctgatgtggaagatttcttggggcaagcccttaaagataaggaatcagagaagttcatttcagaggagttcatcatccaactgttgttttctatcagttttgctagctttgagtccatctccaccactcttactttgattctcaagctccttgatgaacacccagaagtagtgaaagagttggaagctgaacacgaggcgattcgaaaagctagagcagatccagatggaccaattacttgggaagaatacaaatccatgacttttacattacaagtcatcaatgaaaccctaaggttggggagtgtcacacctgccttgttgaggaaaacagttaaagatcttcaagtaaaaggatacataatcccggaaggatggacaataatgcttgtcaccgcttcacgtcacagagatccaaaagtctataaggaccctcatatcttcaatccatggcgttggaaggacttggactcaattaccatccaaaagaacttcatgccttttgggggaggcttaaggcattgtgctggtgctgagtactctaaagtctacttgtgcaccttcttgcacatcctctgtaccaaataccgatggaccaaacttgggggaggaaggattgcaagagctcatatattgagttttgaagatgggttacatgtgaagttcacgccaaaagaa

SEQ ID NO: 297 - DNA, 1500 bp, Artificial Sequence
  Synthetic
atgaattttaaaatactcctcccgatttgtgctttattgacacttacaacatttctgttgaccattattgcaactgcgggttcttggactgtcgtgctcggtttggcgacgctgtttgtcgcctactacatccattggattaacaaatggagagattccaagttcaacggagttctgccgccgggcaccatgggtttgccgctcatcggagaaacgattcaactgagtcgacccagtgactccctcgacgttcaccctttcatccagaaaaaagttgaaagatacgggccgatcttcaaaacatgtctggccggaaggccggtggtggtgtcggcggacgcagagttcaacaactacataatgctgcaggaaggaagagcagtggaaatgtggtatttggatacgctctccaaatttttcggcctcgacaccgagtggctcaaagctctgggcctcatccacaagtacatcagaagcattactctcaatcacttcggcgccgaggccctgcgggagagatttcttccttttattgaagcatcctccatggaagcccttcactcctggtctactcaacctagcgtcgaagtcaaaaatgcctccgctctcatggtttttaggacctcggtgaataagatgttcggtgaggatgcgaagaagctatcgggaaatatccctgggaagttcacgaagcttctaggaggatttctcagtttaccactgaattttcccggcaccacctaccacaaatgcttgaaggatatgaaggaaatccagaagaagctaagagaggttgtagacgatagattggctaatgtgggccctgatgtggaagatttcttggggcaagcccttaaagataaggaatcagagaagttcatttcagaggagttcatcatccaactgttgttttctatcagttttgctagctttgagtccatctccaccactcttactttgattctcaagctccttgatgaacacccagaagtagtgaaagagttggaagctgaacacgaggcgattcgaaaagctagagcagatccagatggaccaattacttgggaagaatacaaatccatgacttttacattacaagtcatcaatgaaaccctaaggttggggagtgtcacacctgccttgttgaggaaaacagttaaagatcttcaagtaaaaggatacataatcccggaaggatggacaataatgcttgtcaccgcttcacgtcacagagatccaaaagtctataaggaccctcatatcttcaatccatggcgttggaaggacttggactcaattaccatccaaaagaacttcatgccttttgggggaggcttaaggcattgtgctggtgctgagtactctaaagtctacttgtgcaccttcttgcacatcctctgtaccaaataccgatggaccaaacttgggggaggaaggattgcaagagctcatatattgagttttgaagatgggttacatgtgaagttcacgccaaaagaa

SEQ ID NO: 298 - DNA, 1482 bp, Artificial Sequence
  Synthetic
atgtctgaagtagcggaaacatgggtggatacctggatggcaaaattagtcaactatgactacaagtggactgtcgtgctcggtttggcgacgctgtttgtcgcctactacatccattggattaacaaatggagagattccaagttcaacggagttctgccgccgggcaccatgggtttgccgctcatcggagaaacgattcaactgagtcgacccagtgactccctcgacgttcaccctttcatccagaaaaaagttgaaagatacgggccgatcttcaaaacatgtctggccggaaggccggtggtggtgtcggcggacgcagagttcaacaactacataatgctgcaggaaggaagagcagtggaaatgtggtatttggatacgctctccaaatttttcggcctcgacaccgagtggctcaaagctctgggcctcatccacaagtacatcagaagcattactctcaatcacttcggcgccgaggccctgcgggagagatttcttccttttattgaagcatcctccatggaagcccttcactcctggtctactcaacctagcgtcgaagtcaaaaatgcctccgctctcatggtttttaggacctcggtgaataagatgttcggtgaggatgcgaagaagctatcgggaaatatccctgggaagttcacgaagcttctaggaggatttctcagtttaccactgaattttcccggcaccacctaccacaaatgcttgaaggatatgaaggaaatccagaagaagctaagagaggttgtagacgatagattggctaatgtgggccctgatgtggaagatttcttggggcaagcccttaaagataaggaatcagagaagttcatttcagaggagttcatcatccaactgttgttttctatcagttttgctagctttgagtccatctccaccactcttactttgattctcaagctccttgatgaacacccagaagtagtgaaagagttggaagctgaacacgaggcgattcgaaaagctagagcagatccagatggaccaattacttgggaagaatacaaatccatgacttttacattacaagtcatcaatgaaaccctaaggttggggagtgtcacacctgccttgttgaggaaaacagttaaagatcttcaagtaaaaggatacataatcccggaaggatggacaataatgcttgtcaccgcttcacgtcacagagatccaaaagtctataaggaccctcatatcttcaatccatggcgttggaaggacttggactcaattaccatccaaaagaacttcatgccttttgggggaggcttaaggcattgtgctggtgctgagtactctaaagtctacttgtgcaccttcttgcacatcctctgtaccaaataccgatggaccaaacttgggggaggaaggattgcaagagctcatatattgagttttgaagatgggttacatgtgaagttcacgccaaaagaa

SEQ ID NO: 299 - DNA, 1545 bp, Artificial Sequence
  Synthetic
atgtcgctgatcagcatcctgtctcccctaattacttccgagggcttagattcaagaatcaaaccttcaccaaaaaaggatgcctctactaccactaagccatcactatggaaaactactgagttcaaatggactgtcgtgctcggtttggcgacgctgtttgtcgcctactacatccattggattaacaaatggagagattccaagttcaacggagttctgccgccgggcaccatgggtttgccgctcatcggagaaacgattcaactgagtcgacccagtgactccctcgacgttcaccctttcatccagaaaaaagttgaaagatacgggccgatcttcaaaacatgtctggccggaaggccggtggtggtgtcggcggacgcagagttcaacaactacataatgctgcaggaaggaagagcagtggaaatgtggtatttggatacgctctccaaatttttcggcctcgacaccgagtggctcaaagctctgggcctcatccacaagtacatcagaagcattactctcaatcacttcggcgccgaggccctgcgggagagatttcttccttttattgaagcatcctccatggaagcccttcactcctggtctactcaacctagcgtcgaagtcaaaaatgcctccgctctcatggtttttaggacctcggtgaataagatgttcggtgaggatgcgaagaagctatcgggaaatatccctgggaagttcacgaagcttctaggaggatttctcagtttaccactgaattttcccggcaccacctaccacaaatgcttgaaggatatgaaggaaatccagaagaagctaagagaggttgtagacgatagattggctaatgtgggccctgatgtggaagatttcttggggcaagcccttaaagataaggaatcagagaagttcatttcagaggagttcatcatccaactgttgttttctatcagttttgctagctttgagtccatctccaccactcttactttgattctcaagctccttgatgaacacccagaagtagtgaaagagttggaagctgaacacgaggcgattcgaaaagctagagcagatccagatggaccaattacttgggaagaatacaaatccatgacttttacattacaagtcatcaatgaaaccctaaggttggggagtgtcacacctgccttgttgaggaaaacagttaaagatcttcaagtaaaaggatacataatcccggaaggatggacaataatgcttgtcaccgcttcacgtcacagagatccaaaagtctataaggaccctcatatcttcaatccatggcgttggaaggacttggactcaattaccatccaaaagaacttcatgccttttgggggaggcttaaggcattgtgctggtgctgagtactctaaagtctacttgtgcaccttcttgcacatcctctgtaccaaataccgatggaccaaacttgggggaggaaggattgcaagagctcatatattgagttttgaagatgggttacatgtgaagttcacgccaaaagaa

SEQ ID NO: 300 - DNA, 1434 bp, Artificial Sequence
  Synthetic
atggctattgatgctcaatggactgtcgtgctcggtttggcgacgctgtttgtcgcctactacatccattggattaacaaatggagagattccaagttcaacggagttctgccgccgggcaccatgggtttgccgctcatcggagaaacgattcaactgagtcgacccagtgactccctcgacgttcaccctttcatccagaaaaaagttgaaagatacgggccgatcttcaaaacatgtctggccggaaggccggtggtggtgtcggcggacgcagagttcaacaactacataatgctgcaggaaggaagagcagtggaaatgtggtatttggatacgctctccaaatttttcggcctcgacaccgagtggctcaaagctctgggcctcatccacaagtacatcagaagcattactctcaatcacttcggcgccgaggccctgcgggagagatttcttccttttattgaagcatcctccatggaagcccttcactcctggtctactcaacctagcgtcgaagtcaaaaatgcctccgctctcatggtttttaggacctcggtgaataagatgttcggtgaggatgcgaagaagctatcgggaaatatccctgggaagttcacgaagcttctaggaggatttctcagtttaccactgaattttcccggcaccacctaccacaaatgcttgaaggatatgaaggaaatccagaagaagctaagagaggttgtagacgatagattggctaatgtgggccctgatgtggaagatttcttggggcaagcccttaaagataaggaatcagagaagttcatttcagaggagttcatcatccaactgttgttttctatcagttttgctagctttgagtccatctccaccactcttactttgattctcaagctccttgatgaacacccagaagtagtgaaagagttggaagctgaacacgaggcgattcgaaaagctagagcagatccagatggaccaattacttgggaagaatacaaatccatgacttttacattacaagtcatcaatgaaaccctaaggttggggagtgtcacacctgccttgttgaggaaaacagttaaagatcttcaagtaaaaggatacataatcccggaaggatggacaataatgcttgtcaccgcttcacgtcacagagatccaaaagtctataaggaccctcatatcttcaatccatggcgttggaaggacttggactcaattaccatccaaaagaacttcatgccttttgggggaggcttaaggcattgtgctggtgctgagtactctaaagtctacttgtgcaccttcttgcacatcctctgtaccaaataccgatggaccaaacttgggggaggaaggattgcaagagctcatatattgagttttgaagatgggttacatgtgaagttcacgccaaaagaa

SEQ ID NO: 301 - DNA, 1512 bp, Artificial Sequence
  Synthetic
atgtctggttttcgtctaattgatatcgttaagcctatcctaccgattttaccggaagttgagttaccttttgaaaaattaccatttgatgacaagtggactgtcgtgctcggtttggcgacgctgtttgtcgcctactacatccattggattaacaaatggagagattccaagttcaacggagttctgccgccgggcaccatgggtttgccgctcatcggagaaacgattcaactgagtcgacccagtgactccctcgacgttcaccctttcatccagaaaaaagttgaaagatacgggccgatcttcaaaacatgtctggccggaaggccggtggtggtgtcggcggacgcagagttcaacaactacataatgctgcaggaaggaagagcagtggaaatgtggtatttggatacgctctccaaatttttcggcctcgacaccgagtggctcaaagctctgggcctcatccacaagtacatcagaagcattactctcaatcacttcggcgccgaggccctgcgggagagatttcttccttttattgaagcatcctccatggaagcccttcactcctggtctactcaacctagcgtcgaagtcaaaaatgcctccgctctcatggtttttaggacctcggtgaataagatgttcggtgaggatgcgaagaagctatcgggaaatatccctgggaagttcacgaagcttctaggaggatttctcagtttaccactgaattttcccggcaccacctaccacaaatgcttgaaggatatgaaggaaatccagaagaagctaagagaggttgtagacgatagattggctaatgtgggccctgatgtggaagatttcttggggcaagcccttaaagataaggaatcagagaagttcatttcagaggagttcatcatccaactgttgttttctatcagttttgctagctttgagtccatctccaccactcttactttgattctcaagctccttgatgaacacccagaagtagtgaaagagttggaagctgaacacgaggcgattcgaaaagctagagcagatccagatggaccaattacttgggaagaatacaaatccatgacttttacattacaagtcatcaatgaaaccctaaggttggggagtgtcacacctgccttgttgaggaaaacagttaaagatcttcaagtaaaaggatacataatcccggaaggatggacaataatgcttgtcaccgcttcacgtcacagagatccaaaagtctataaggaccctcatatcttcaatccatggcgttggaaggacttggactcaattaccatccaaaagaacttcatgccttttgggggaggcttaaggcattgtgctggtgctgagtactctaaagtctacttgtgcaccttcttgcacatcctctgtaccaaataccgatggaccaaacttgggggaggaaggattgcaagagctcatatattgagttttgaagatgggttacatgtgaagttcacgccaaaagaa

SEQ ID NO: 302 - DNA, 1449 bp, Artificial Sequence
  Synthetic
atggcgtttgaggattatttttctttccagatatggactgtcgtgctcggtttggcgacgctgtttgtcgcctactacatccattggattaacaaatggagagattccaagttcaacggagttctgccgccgggcaccatgggtttgccgctcatcggagaaacgattcaactgagtcgacccagtgactccctcgacgttcaccctttcatccagaaaaaagttgaaagatacgggccgatcttcaaaacatgtctggccggaaggccggtggtggtgtcggcggacgcagagttcaacaactacataatgctgcaggaaggaagagcagtggaaatgtggtatttggatacgctctccaaatttttcggcctcgacaccgagtggctcaaagctctgggcctcatccacaagtacatcagaagcattactctcaatcacttcggcgccgaggccctgcgggagagatttcttccttttattgaagcatcctccatggaagcccttcactcctggtctactcaacctagcgtcgaagtcaaaaatgcctccgctctcatggtttttaggacctcggtgaataagatgttcggtgaggatgcgaagaagctatcgggaaatatccctgggaagttcacgaagcttctaggaggatttctcagtttaccactgaattttcccggcaccacctaccacaaatgcttgaaggatatgaaggaaatccagaagaagctaagagaggttgtagacgatagattggctaatgtgggccctgatgtggaagatttcttggggcaagcccttaaagataaggaatcagagaagttcatttcagaggagttcatcatccaactgttgttttctatcagttttgctagctttgagtccatctccaccactcttactttgattctcaagctccttgatgaacacccagaagtagtgaaagagttggaagctgaacacgaggcgattcgaaaagctagagcagatccagatggaccaattacttgggaagaatacaaatccatgacttttacattacaagtcatcaatgaaaccctaaggttggggagtgtcacacctgccttgttgaggaaaacagttaaagatcttcaagtaaaaggatacataatcccggaaggatggacaataatgcttgtcaccgcttcacgtcacagagatccaaaagtctataaggaccctcatatcttcaatccatggcgttggaaggacttggactcaattaccatccaaaagaacttcatgccttttgggggaggcttaaggcattgtgctggtgctgagtactctaaagtctacttgtgcaccttcttgcacatcctctgtaccaaataccgatggaccaaacttgggggaggaaggattgcaagagctcatatattgagttttgaagatgggttacatgtgaagttcacgccaaaagaa

SEQ ID NO: 303 - DNA, 1581 bp, Artificial Sequence
  Synthetic
atgtctgccgttttcaacaacgctaccctttcaggtctagtccaagcaagcacctactcacaaactttgcaaaatgtcgcccattaccaacctcaattgaatttcatggagaaatactgggccgcatggtacagttacatgaacaatgatgttttggccaccggttggactgtcgtgctcggtttggcgacgctgtttgtcgcctactacatccattggattaacaaatggagagattccaagttcaacggagttctgccgccgggcaccatgggtttgccgctcatcggagaaacgattcaactgagtcgacccagtgactccctcgacgttcaccctttcatccagaaaaaagttgaaagatacgggccgatcttcaaaacatgtctggccggaaggccggtggtggtgtcggcggacgcagagttcaacaactacataatgctgcaggaaggaagagcagtggaaatgtggtatttggatacgctctccaaatttttcggcctcgacaccgagtggctcaaagctctgggcctcatccacaagtacatcagaagcattactctcaatcacttcggcgccgaggccctgcgggagagatttcttccttttattgaagcatcctccatggaagcccttcactcctggtctactcaacctagcgtcgaagtcaaaaatgcctccgctctcatggtttttaggacctcggtgaataagatgttcggtgaggatgcgaagaagctatcgggaaatatccctgggaagttcacgaagcttctaggaggatttctcagtttaccactgaattttcccggcaccacctaccacaaatgcttgaaggatatgaaggaaatccagaagaagctaagagaggttgtagacgatagattggctaatgtgggccctgatgtggaagatttcttggggcaagcccttaaagataaggaatcagagaagttcatttcagaggagttcatcatccaactgttgttttctatcagttttgctagctttgagtccatctccaccactcttactttgattctcaagctccttgatgaacacccagaagtagtgaaagagttggaagctgaacacgaggcgattcgaaaagctagagcagatccagatggaccaattacttgggaagaatacaaatccatgacttttacattacaagtcatcaatgaaaccctaaggttggggagtgtcacacctgccttgttgaggaaaacagttaaagatcttcaagtaaaaggatacataatcccggaaggatggacaataatgcttgtcaccgcttcacgtcacagagatccaaaagtctataaggaccctcatatcttcaatccatggcgttggaaggacttggactcaattaccatccaaaagaacttcatgccttttgggggaggcttaaggcattgtgctggtgctgagtactctaaagtctacttgtgcaccttcttgcacatcctctgtaccaaataccgatggaccaaacttgggggaggaaggattgcaagagctcatatattgagttttgaagatgggttacatgtgaagttcacgccaaaagaa

SEQ ID NO: 304 - DNA, 1491 bp, Artificial Sequence
  Synthetic
atgtctgctaccaagtcaatcgttggagaggcattggaatacgtaaacattggtttaagtcatttcttggctttaccaactgtcgtgctcggtttggcgacgctgtttgtcgcctactacatccattggattaacaaatggagagattccaagttcaacggagttctgccgccgggcaccatgggtttgccgctcatcggagaaacgattcaactgagtcgacccagtgactccctcgacgttcaccctttcatccagaaaaaagttgaaagatacgggccgatcttcaaaacatgtctggccggaaggccggtggtggtgtcggcggacgcagagttcaacaactacataatgctgcaggaaggaagagcagtggaaatgtggtatttggatacgctctccaaatttttcggcctcgacaccgagtggctcaaagctctgggcctcatccacaagtacatcagaagcattactctcaatcacttcggcgccgaggccctgcgggagagatttcttccttttattgaagcatcctccatggaagcccttcactcctggtctactcaacctagcgtcgaagtcaaaaatgcctccgctctcatggtttttaggacctcggtgaataagatgttcggtgaggatgcgaagaagctatcgggaaatatccctgggaagttcacgaagcttctaggaggatttctcagtttaccactgaattttcccggcaccacctaccacaaatgcttgaaggatatgaaggaaatccagaagaagctaagagaggttgtagacgatagattggctaatgtgggccctgatgtggaagatttcttggggcaagcccttaaagataaggaatcagagaagttcatttcagaggagttcatcatccaactgttgttttctatcagttttgctagctttgagtccatctccaccactcttactttgattctcaagctccttgatgaacacccagaagtagtgaaagagttggaagctgaacacgaggcgattcgaaaagctagagcagatccagatggaccaattacttgggaagaatacaaatccatgacttttacattacaagtcatcaatgaaaccctaaggttggggagtgtcacacctgccttgttgaggaaaacagttaaagatcttcaagtaaaaggatacataatcccggaaggatggacaataatgcttgtcaccgcttcacgtcacagagatccaaaagtctataaggaccctcatatcttcaatccatggcgttggaaggacttggactcaattaccatccaaaagaacttcatgccttttgggggaggcttaaggcattgtgctggtgctgagtactctaaagtctacttgtgcaccttcttgcacatcctctgtaccaaataccgatggaccaaacttgggggaggaaggattgcaagagctcatatattgagttttgaagatgggttacatgtgaagttcacgccaaaagaa

SEQ ID NO: 305 - protein, 494 aa, Artificial Sequence
  Synthetic
MSEVAETWVDTWMAKLVNYDYKWTVVLGLATLFVAYYIHWINKWRDSKFNGVLPPGTMGLPLIGETIQLSRPSDSLDVHPFIQKKVERYGPIFKTCLAGRPVVVSADAEFNNYIMLQEGRAVEMWYLDTLSKFFGLDTEWLKALGLIHKYIRSITLNHFGAEALRERFLPFIEASSMEALHSWSTQPSVEVKNASALMVFRTSVNKMFGEDAKKLSGNIPGKFTKLLGGFLSLPLNFPGTTYHKCLKDMKEIQKKLREVVDDRLANVGPDVEDFLGQALKDKESEKFISEEFIIQLLFSISFASFESISTTLTLILKLLDEHPEVVKELEAEHEAIRKARADPDGPITWEEYKSMTFTLQVINETLRLGSVMPALLRKTVKDLQVKGYIIPEGWTIMLVTASRHRDPKVYKDPHIFNPWRWKDLDSITIQKNFMPFGGGLRHCAGAEYSKVYLCTFLHILCTKYRWTKLGGGRIARAHILSFEDGLHVKFTPKE

SEQ ID NO: 306 - protein, 494 aa, Artificial Sequence
  Synthetic
MSEVAETWVDTWMAKLVNYDYKWTVVLGLATLFVAYYIHWINKWRDSKFNGVLPPGTMGLPLIGETIQLLRPSDSLDVHPFIQKKVERYGPIFKTCLAGRPVVVSADAEFNNYIMLQEGRAVEMWYLDTLSKFFGLDTEWLKALGLIHKYIRSITLNHFGAEALRERFLPFIEASSMEALHSWSTQPSVEVKNASALMVFRTSVNKMFGEDAKKLSGNIPGKFTKLLGGFLSLPLNFPGTTYHKCLKDMKEIQKKLREVVDDRLANVGPDVEDFLGQALKDKESEKFISEEFIIQLLFSISFASFESISTTLTLILKLLDEHPEVVKELEAEHEAIRKARADPDGPITWEEYKSMTFTLQVINETLRLGSVTPALLRKTVKDLQVKGYIIPEGWTIMLVTASRHRDPKVYKDPHIFNPWRWKDLDSITIQKNFMPFGGGLRHCAGAEYSKVYLCTFLHILCTKYRWTKLGGGRIARAHILSFEDGLHVKFTPKE

SEQ ID NO: 307 - protein, 494 aa, Artificial Sequence
  Synthetic
MSEVAETWVDTWMAKLVNYDYKWTVVLGLATLFVAYYIHWINKWRDSKFNGVLPPGTMGLPLIGETIQLFRPSDSLDVHPFIQKKVERYGPIFKTCLAGRPVVVSADAEFNNYIMLQEGRAVEMWYLDTLSKFFGLDTEWLKALGLIHKYIRSITLNHFGAEALRERFLPFIEASSMEALHSWSTQPSVEVKNASALMVFRTSVNKMFGEDAKKLSGNIPGKFTKLLGGFLSLPLNFPGTTYHKCLKDMKEIQKKLREVVDDRLANVGPDVEDFLGQALKDKESEKFISEEFIIQLLFSISFASFESISTTLTLILKLLDEHPEVVKELEAEHEAIRKARADPDGPITWEEYKSMTFTLQVINETLRLGSVTPALLRKTVKDLQVKGYIIPEGWTIMLVTASRHRDPKVYKDPHIFNPWRWKDLDSITIQKNFMPFGGGLRHCAGAEYSKVYLCTFLHILCTKYRWTKLGGGRIARAHILSFEDGLHVKFTPKE

SEQ ID NO: 308 - protein, 478 aa, Artificial Sequence
  Synthetic
MSLYYTWTVVLGLATLFVAYYIHWINKWRDSKFNGVLPPGTMGLPLIGETIQLSRPSDSLDVHPFIQKKVERYGPIFKTCLAGRPVVVSADAEFNNYIMLQEGRAVEMWYLDTLSKFFGLDTEWLKALGLIHKYIRSITLNHFGAEALRERFLPFIEASSMEALHSWSTQPSVEVKNASALMVFRTSVNKMFGEDAKKLSGNIPGKFTKLLGGFLSLPLNFPGTTYHKCLKDMKEIQKKLREVVDDRLANVGPDVEDFLGQALKDKESEKFISEEFIIQLLFSISFASFESISTTLTLILKLLDEHPEVVKELEAEHEAIRKARADPDGPITWEEYKSMTFTLQVINETLRLGSVMPALLRKTVKDLQVKGYIIPEGWTIMLVTASRHRDPKVYKDPHIFNPWRWKDLDSITIQKNFMPFGGGLRHCAGAEYSKVYLCTFLHILCTKYRWTKLGGGRIARAHILSFEDGLHVKFTPKE

SEQ ID NO: 309 - protein, 478 aa, Artificial Sequence
  Synthetic
MSLYYTWTVVLGLATLFVAYYIHWINKWRDSKFNGVLPPGTMGLPLIGETIQLLRPSDSLDVHPFIQKKVERYGPIFKTCLAGRPVVVSADAEFNNYIMLQEGRAVEMWYLDTLSKFFGLDTEWLKALGLIHKYIRSITLNHFGAEALRERFLPFIEASSMEALHSWSTQPSVEVKNASALMVFRTSVNKMFGEDAKKLSGNIPGKFTKLLGGFLSLPLNFPGTTYHKCLKDMKEIQKKLREVVDDRLANVGPDVEDFLGQALKDKESEKFISEEFIIQLLFSISFASFESISTTLTLILKLLDEHPEVVKELEAEHEAIRKARADPDGPITWEEYKSMTFTLQVINETLRLGSVTPALLRKTVKDLQVKGYIIPEGWTIMLVTASRHRDPKVYKDPHIFNPWRWKDLDSITIQKNFMPFGGGLRHCAGAEYSKVYLCTFLHILCTKYRWTKLGGGRIARAHILSFEDGLHVKFTPKE

SEQ ID NO: 310 - protein, 478 aa, Artificial Sequence
  Synthetic
MSLYYTWTVVLGLATLFVAYYIHWINKWRDSKFNGVLPPGTMGLPLIGETIQLFRPSDSLDVHPFIQKKVERYGPIFKTCLAGRPVVVSADAEFNNYIMLQEGRAVEMWYLDTLSKFFGLDTEWLKALGLIHKYIRSITLNHFGAEALRERFLPFIEASSMEALHSWSTQPSVEVKNASALMVFRTSVNKMFGEDAKKLSGNIPGKFTKLLGGFLSLPLNFPGTTYHKCLKDMKEIQKKLREVVDDRLANVGPDVEDFLGQALKDKESEKFISEEFIIQLLFSISFASFESISTTLTLILKLLDEHPEVVKELEAEHEAIRKARADPDGPITWEEYKSMTFTLQVINETLRLGSVTPALLRKTVKDLQVKGYIIPEGWTIMLVTASRHRDPKVYKDPHIFNPWRWKDLDSITIQKNFMPFGGGLRHCAGAEYSKVYLCTFLHILCTKYRWTKLGGGRIARAHILSFEDGLHVKFTPKE

SEQ ID NO: 311 - DNA, 1485 bp, Artificial Sequence
  Synthetic
atgtctgaagtagcggaaacatgggtggatacctggatggcaaaattagtcaactatgactacaagtggactgtcgtgctcggtttggcgacgctgtttgtcgcctactacatccattggattaacaaatggagagattccaagttcaacggagttctgccgccgggcaccatgggtttgccgctcatcggagaaacgattcaactgagtcgacccagtgactccctcgacgttcaccctttcatccagaaaaaagttgaaagatacgggccgatcttcaaaacatgtctggccggaaggccggtggtggtgtcggcggacgcagagttcaacaactacataatgctgcaggaaggaagagcagtggaaatgtggtatttggatacgctctccaaatttttcggcctcgacaccgagtggctcaaagctctgggcctcatccacaagtacatcagaagcattactctcaatcacttcggcgccgaggccctgcgggagagatttcttccttttattgaagcatcctccatggaagcccttcactcctggtctactcaacctagcgtcgaagtcaaaaatgcctccgctctcatggtttttaggacctcggtgaataagatgttcggtgaggatgcgaagaagctatcgggaaatatccctgggaagttcacgaagcttctaggaggatttctcagtttaccactgaattttcccggcaccacctaccacaaatgcttgaaggatatgaaggaaatccagaagaagctaagagaggttgtagacgatagattggctaatgtgggccctgatgtggaagatttcttggggcaagcccttaaagataaggaatcagagaagttcatttcagaggagttcatcatccaactgttgttttctatcagttttgctagctttgagtccatctccaccactcttactttgattctcaagctccttgatgaacacccagaagtagtgaaagagttggaagctgaacacgaggcgattcgaaaagctagagcagatccagatggaccaattacttgggaagaatacaaatccatgacttttacattacaagtcatcaatgaaaccctaaggttggggagtgtcatgcctgccttgttgaggaaaacagttaaagatcttcaagtaaaaggatacataatcccggaaggatggacaataatgcttgtcaccgcttcacgtcacagagatccaaaagtctataaggaccctcatatcttcaatccatggcgttggaaggacttggactcaattaccatccaaaagaacttcatgccttttgggggaggcttaaggcattgtgctggtgctgagtactctaaagtctacttgtgcaccttcttgcacatcctctgtaccaaataccgatggaccaaacttgggggaggaaggattgcaagagctcatatattgagttttgaagatgggttacatgtgaagttcacgccaaaagaataa

SEQ ID NO: 312 - DNA, 1485 bp, Artificial Sequence
  Synthetic
atgtctgaagtagcggaaacatgggtggatacctggatggcaaaattagtcaactatgactacaagtggactgtcgtgctcggtttggcgacgctgtttgtcgcctactacatccattggattaacaaatggagagattccaagttcaacggagttctgccgccgggcaccatgggtttgccgctcatcggagaaacgattcaactgcttcgacccagtgactccctcgacgttcaccctttcatccagaaaaaagttgaaagatacgggccgatcttcaaaacatgtctggccggaaggccggtggtggtgtcggcggacgcagagttcaacaactacataatgctgcaggaaggaagagcagtggaaatgtggtatttggatacgctctccaaatttttcggcctcgacaccgagtggctcaaagctctgggcctcatccacaagtacatcagaagcattactctcaatcacttcggcgccgaggccctgcgggagagatttcttccttttattgaagcatcctccatggaagcccttcactcctggtctactcaacctagcgtcgaagtcaaaaatgcctccgctctcatggtttttaggacctcggtgaataagatgttcggtgaggatgcgaagaagctatcgggaaatatccctgggaagttcacgaagcttctaggaggatttctcagtttaccactgaattttcccggcaccacctaccacaaatgcttgaaggatatgaaggaaatccagaagaagctaagagaggttgtagacgatagattggctaatgtgggccctgatgtggaagatttcttggggcaagcccttaaagataaggaatcagagaagttcatttcagaggagttcatcatccaactgttgttttctatcagttttgctagctttgagtccatctccaccactcttactttgattctcaagctccttgatgaacacccagaagtagtgaaagagttggaagctgaacacgaggcgattcgaaaagctagagcagatccagatggaccaattacttgggaagaatacaaatccatgacttttacattacaagtcatcaatgaaaccctaaggttggggagtgtcacacctgccttgttgaggaaaacagttaaagatcttcaagtaaaaggatacataatcccggaaggatggacaataatgcttgtcaccgcttcacgtcacagagatccaaaagtctataaggaccctcatatcttcaatccatggcgttggaaggacttggactcaattaccatccaaaagaacttcatgccttttgggggaggcttaaggcattgtgctggtgctgagtactctaaagtctacttgtgcaccttcttgcacatcctctgtaccaaataccgatggaccaaacttgggggaggaaggattgcaagagctcatatattgagttttgaagatgggttacatgtgaagttcacgccaaaagaataa

SEQ ID NO: 313 - DNA, 1485 bp, Artificial Sequence
  Synthetic
atgtctgaagtagcggaaacatgggtggatacctggatggcaaaattagtcaactatgactacaagtggactgtcgtgctcggtttggcgacgctgtttgtcgcctactacatccattggattaacaaatggagagattccaagttcaacggagttctgccgccgggcaccatgggtttgccgctcatcggagaaacgattcaactgtttcgacccagtgactccctcgacgttcaccctttcatccagaaaaaagttgaaagatacgggccgatcttcaaaacatgtctggccggaaggccggtggtggtgtcggcggacgcagagttcaacaactacataatgctgcaggaaggaagagcagtggaaatgtggtatttggatacgctctccaaatttttcggcctcgacaccgagtggctcaaagctctgggcctcatccacaagtacatcagaagcattactctcaatcacttcggcgccgaggccctgcgggagagatttcttccttttattgaagcatcctccatggaagcccttcactcctggtctactcaacctagcgtcgaagtcaaaaatgcctccgctctcatggtttttaggacctcggtgaataagatgttcggtgaggatgcgaagaagctatcgggaaatatccctgggaagttcacgaagcttctaggaggatttctcagtttaccactgaattttcccggcaccacctaccacaaatgcttgaaggatatgaaggaaatccagaagaagctaagagaggttgtagacgatagattggctaatgtgggccctgatgtggaagatttcttggggcaagcccttaaagataaggaatcagagaagttcatttcagaggagttcatcatccaactgttgttttctatcagttttgctagctttgagtccatctccaccactcttactttgattctcaagctccttgatgaacacccagaagtagtgaaagagttggaagctgaacacgaggcgattcgaaaagctagagcagatccagatggaccaattacttgggaagaatacaaatccatgacttttacattacaagtcatcaatgaaaccctaaggttggggagtgtcacacctgccttgttgaggaaaacagttaaagatcttcaagtaaaaggatacataatcccggaaggatggacaataatgcttgtcaccgcttcacgtcacagagatccaaaagtctataaggaccctcatatcttcaatccatggcgttggaaggacttggactcaattaccatccaaaagaacttcatgccttttgggggaggcttaaggcattgtgctggtgctgagtactctaaagtctacttgtgcaccttcttgcacatcctctgtaccaaataccgatggaccaaacttgggggaggaaggattgcaagagctcatatattgagttttgaagatgggttacatgtgaagttcacgccaaaagaataa

SEQ ID NO: 314 - DNA, 1437 bp, Artificial Sequence
  Synthetic
atgtcattatattacacctggactgtcgtgctcggtttggcgacgctgtttgtcgcctactacatccattggattaacaaatggagagattccaagttcaacggagttctgccgccgggcaccatgggtttgccgctcatcggagaaacgattcaactgagtcgacccagtgactccctcgacgttcaccctttcatccagaaaaaagttgaaagatacgggccgatcttcaaaacatgtctggccggaaggccggtggtggtgtcggcggacgcagagttcaacaactacataatgctgcaggaaggaagagcagtggaaatgtggtatttggatacgctctccaaatttttcggcctcgacaccgagtggctcaaagctctgggcctcatccacaagtacatcagaagcattactctcaatcacttcggcgccgaggccctgcgggagagatttcttccttttattgaagcatcctccatggaagcccttcactcctggtctactcaacctagcgtcgaagtcaaaaatgcctccgctctcatggtttttaggacctcggtgaataagatgttcggtgaggatgcgaagaagctatcgggaaatatccctgggaagttcacgaagcttctaggaggatttctcagtttaccactgaattttcccggcaccacctaccacaaatgcttgaaggatatgaaggaaatccagaagaagctaagagaggttgtagacgatagattggctaatgtgggccctgatgtggaagatttcttggggcaagcccttaaagataaggaatcagagaagttcatttcagaggagttcatcatccaactgttgttttctatcagttttgctagctttgagtccatctccaccactcttactttgattctcaagctccttgatgaacacccagaagtagtgaaagagttggaagctgaacacgaggcgattcgaaaagctagagcagatccagatggaccaattacttgggaagaatacaaatccatgacttttacattacaagtcatcaatgaaaccctaaggttggggagtgtcatgcctgccttgttgaggaaaacagttaaagatcttcaagtaaaaggatacataatcccggaaggatggacaataatgcttgtcaccgcttcacgtcacagagatccaaaagtctataaggaccctcatatcttcaatccatggcgttggaaggacttggactcaattaccatccaaaagaacttcatgccttttgggggaggcttaaggcattgtgctggtgctgagtactctaaagtctacttgtgcaccttcttgcacatcctctgtaccaaataccgatggaccaaacttgggggaggaaggattgcaagagctcatatattgagttttgaagatgggttacatgtgaagttcacgccaaaagaataa

SEQ ID NO: 315 - DNA, 1437 bp, Artificial Sequence
  Synthetic
atgtcattatattacacctggactgtcgtgctcggtttggcgacgctgtttgtcgcctactacatccattggattaacaaatggagagattccaagttcaacggagttctgccgccgggcaccatgggtttgccgctcatcggagaaacgattcaactgcttcgacccagtgactccctcgacgttcaccctttcatccagaaaaaagttgaaagatacgggccgatcttcaaaacatgtctggccggaaggccggtggtggtgtcggcggacgcagagttcaacaactacataatgctgcaggaaggaagagcagtggaaatgtggtatttggatacgctctccaaatttttcggcctcgacaccgagtggctcaaagctctgggcctcatccacaagtacatcagaagcattactctcaatcacttcggcgccgaggccctgcgggagagatttcttccttttattgaagcatcctccatggaagcccttcactcctggtctactcaacctagcgtcgaagtcaaaaatgcctccgctctcatggtttttaggacctcggtgaataagatgttcggtgaggatgcgaagaagctatcgggaaatatccctgggaagttcacgaagcttctaggaggatttctcagtttaccactgaattttcccggcaccacctaccacaaatgcttgaaggatatgaaggaaatccagaagaagctaagagaggttgtagacgatagattggctaatgtgggccctgatgtggaagatttcttggggcaagcccttaaagataaggaatcagagaagttcatttcagaggagttcatcatccaactgttgttttctatcagttttgctagctttgagtccatctccaccactcttactttgattctcaagctccttgatgaacacccagaagtagtgaaagagttggaagctgaacacgaggcgattcgaaaagctagagcagatccagatggaccaattacttgggaagaatacaaatccatgacttttacattacaagtcatcaatgaaaccctaaggttggggagtgtcacacctgccttgttgaggaaaacagttaaagatcttcaagtaaaaggatacataatcccggaaggatggacaataatgcttgtcaccgcttcacgtcacagagatccaaaagtctataaggaccctcatatcttcaatccatggcgttggaaggacttggactcaattaccatccaaaagaacttcatgccttttgggggaggcttaaggcattgtgctggtgctgagtactctaaagtctacttgtgcaccttcttgcacatcctctgtaccaaataccgatggaccaaacttgggggaggaaggattgcaagagctcatatattgagttttgaagatgggttacatgtgaagttcacgccaaaagaataa

SEQ ID NO: 316 - DNA, 1437 bp, Artificial Sequence
  Synthetic
atgtcattatattacacctggactgtcgtgctcggtttggcgacgctgtttgtcgcctactacatccattggattaacaaatggagagattccaagttcaacggagttctgccgccgggcaccatgggtttgccgctcatcggagaaacgattcaactgtttcgacccagtgactccctcgacgttcaccctttcatccagaaaaaagttgaaagatacgggccgatcttcaaaacatgtctggccggaaggccggtggtggtgtcggcggacgcagagttcaacaactacataatgctgcaggaaggaagagcagtggaaatgtggtatttggatacgctctccaaatttttcggcctcgacaccgagtggctcaaagctctgggcctcatccacaagtacatcagaagcattactctcaatcacttcggcgccgaggccctgcgggagagatttcttccttttattgaagcatcctccatggaagcccttcactcctggtctactcaacctagcgtcgaagtcaaaaatgcctccgctctcatggtttttaggacctcggtgaataagatgttcggtgaggatgcgaagaagctatcgggaaatatccctgggaagttcacgaagcttctaggaggatttctcagtttaccactgaattttcccggcaccacctaccacaaatgcttgaaggatatgaaggaaatccagaagaagctaagagaggttgtagacgatagattggctaatgtgggccctgatgtggaagatttcttggggcaagcccttaaagataaggaatcagagaagttcatttcagaggagttcatcatccaactgttgttttctatcagttttgctagctttgagtccatctccaccactcttactttgattctcaagctccttgatgaacacccagaagtagtgaaagagttggaagctgaacacgaggcgattcgaaaagctagagcagatccagatggaccaattacttgggaagaatacaaatccatgacttttacattacaagtcatcaatgaaaccctaaggttggggagtgtcacacctgccttgttgaggaaaacagttaaagatcttcaagtaaaaggatacataatcccggaaggatggacaataatgcttgtcaccgcttcacgtcacagagatccaaaagtctataaggaccctcatatcttcaatccatggcgttggaaggacttggactcaattaccatccaaaagaacttcatgccttttgggggaggcttaaggcattgtgctggtgctgagtactctaaagtctacttgtgcaccttcttgcacatcctctgtaccaaataccgatggaccaaacttgggggaggaaggattgcaagagctcatatattgagttttgaagatgggttacatgtgaagttcacgccaaaagaataa

SEQ ID NO: 317-396 - skipped (80 entries)

SEQ ID NO: 397 - DNA, 1563 bp, Artificial Sequence
  Synthetic
atggaaatgtcctcaagtgtcgcagccacaatcagtatctggatggtcgtcgtatgtatcgtaggtgtaggttggagagtcgtaaattgggtttggttgagaccaaagaaattggaaaagagattgagagaacaaggtttggccggtaattcttacagattgttgttcggtgacttgaaggaaagagctgcaatggaagaacaagcaaattcaaagcctataaacttctcccatgacatcggtccaagagttttcccttcaatgtacaagaccatccaaaactacggtaaaaactcctacatgtggttaggtccataccctagagtccacatcatggatccacaacaattgaagaccgtttttactttggtctacgacattcaaaagccaaatttgaaccctttgattaaattcttgttagatggtatcgttacacatgaaggtgaaaagtgggctaagcacagaaagattattaacccagcattccatttggaaaagttgaaggatatgatacctgctttctttcactcatgtaatgaaatcgtcaacgaatgggaaagattgatttcaaaagaaggttcctgcgaattggatgtaatgccttatttgcaaaatttggccgctgacgccatttcaagaaccgcttttggttcttcatacgaagaaggtaaaatgatcttccaattgttgaaggaattgactgatttggttgtcaaggtagcttttggtgtttatattccaggttggagattcttgcctacaaagagtaacaacaaaatgaaggaaattaatagaaaaatcaagtctttgttgttgggtatcattaacaagagacaaaaggcaatggaagaaggtgaagccggtcaatctgatttgttgggtatattaatggaaagtaattctaacgaaatccaaggtgaaggtaataacaaggaagatggcatgtctattgaagacgtcatcgaagagtgtaaggtattttatataggtggtcaagaaactacagcaagattattgatctggactatgatattgttgtccagtcatacagaatggcaagaaagagccagaaccgaagtcttgaaggtatttggtaataagaaaccagatttcgacggtttgtcaagattgaaggtagttactatgatcttgaacgaagttttaagattgtacccacctgcttccatgttgacaagaatcatccaaaaggaaacaagagttggtaaattaaccttgccagcaggtgttatcttgataatgcctatcatcttgatacatagagatcacgacttgtggggtgaagatgctaacgagtttaaaccagaaagattcagtaaaggtgtttctaaggcagccaaagtccaaccagcctttttcccttttggttggggtcctagaatttgcatgggtcaaaacttcgctatgatcgaagctaagatggcattgagtttgatcttgcaaagattttctttcgaattgtcttcatcctacgttcatgcaccaactgtcgtcttcactacacaaccacaacacggtgcccacatcgttttgagaaagttatga

SEQ ID NO: 398 - DNA, 2079 bp, Artificial Sequence
  Synthetic
atgacctctgcattgtatgcttctgatcttttcaaacaattaaagagtataatgggtactgactccttgtctgatgatgtagttttggtaatagctactacatctttagctctagtcgctggttttgtggtcttgctttggaagaagactactgctgatagatccggtgaattgaaacctctgatgattcctaaatctttgatggctaaagatgaagacgatgatttggacctgggctctggtaagacaagagtttctattttttttggtactcaaactggtactgccgagggttttgctaaggctttgtctgaggaaattaaagctagatatgaaaaggccgcagttaaggtgattgatttggatgactatgctgctgatgatgatcaatacgaagaaaaattgaagaaagaaactttggcattcttctgtgtggctacttacggtgatggtgaaccaactgacaacgctgctagattttataaatggttcactgaggaaaatgaaagagatattaagttacaacaattggcttatggtgtttttgccctaggaaatagacaatacgagcattttaataaaatcggtatcgttttggacgaggaactatgtaagaaaggtgctaaaagattaattgaagttggtttaggtgatgacgatcaatcaattgaagatgactttaacgcttggaaagagtctttgtggtctgagttggataaactgttgaaggatgaagatgacaaatcagtagcaacaccatatactgctgttataccagaatatagagttgttactcatgatccaagatttactactcagaaatctatggagtctaatgttgctaacggtaatactactattgatattcatcatccatgcagagtagacgttgccgttcaaaaagaattgcatacccatgagtccgatagatcttgtatccatcttgagttcgatatttctaggactggtattacctatgaaactggtgaccatgtgggtgtttatgcagaaaatcatgtcgaaatagttgaagaagctggtaagttgttgggtcattccttggacctggtcttttctatccatgctgacaaagaagatggaagtccattggaatctgctgtccctccaccatttccaggaccatgcactttgggtactggtttggctagatatgcagacttgttgaatccaccaagaaaatcagcattggttgctctggctgcttatgcaaccgagcctagtgaagctgaaaaattgaagcatcttacttctccagatggtaaagatgaatactctcaatggattgttgcttctcaaagaagtttattagaagtaatggcagcatttccatctgctaaaccaccattaggtgttttctttgctgctatcgctccaagattacagccaagatattattcaatatcttcttcaccaagattggctccatctagggttcatgtcacttctgctctagtttacggtccaacaccaactggtagaatccataagggtgtttgttccacttggatgaagaatgctgttccagcagagaaatctcatgaatgctctggtgctccaatttttataagagcttctaactttaaattaccatctaatccatctactccaatagtaatggtaggaccaggtactggtttagcaccatttagaggtttccttcaagaaagaatggctttaaaagaggacggtgaagaactgggttcttctctgttattctttggttgtagaaatagacaaatggactttatttacgaagatgaattgaataattttgttgatcagggagtaatttccgagttgataatggctttttctagggaaggtgctcaaaaagagtacgtccaacataaaatgatggaaaaagctgctcaggtatgggatttaattaaagaagaaggttatttgtatgtatgcggtgacgctaaaggtatggcaagagacgtacatagaactttgcatactatagtgcaagaacaagaaggtgtgtcttctagtgaagctgaggccattgttaagaaactacaaactgaaggtagatatctgagagacgtatggtaa

SEQ ID NO: 399 - DNA, 2106 bp, Artificial Sequence; identical to SEQ ID NO: 115
  Synthetic

SEQ ID NO: 400 - DNA, 2280 bp, Artificial Sequence
  Synthetic
atgtggaggcttaaagtaggcgcggaatcagtcggggagaatgacgaaaagtggctgaaaagcattagtaaccacttgggtcgccaggtgtgggaattttgcccagatgcaggtacgcaacaacaactattacaggttcataaggctagaaaagccttccatgatgaccgttttcacagaaagcaatcgtccgatttgttcatcaccatacaatatggaaaagaggttgaaaatggaggtaagacagctggcgtaaaactcaaggagggtgaagaagttagaaaggaggcagtcgaatcttctttggaacgggctttatcgttttactcttcaattcaaacttccgatggtaactgggccagtgacctgggtggtccgatgtttttactacccggcttggttatcgccctttatgtaaccggcgtcctgaatagcgtgctatccaaacatcataggcaggaaatgtgtcgatacgtttataaccaccaaaatgaggatgggggttggggattacatattgaaggaccttcaacaatgttcgggtctgcacttaattatgtcgctttgagactcttaggcgaagacgcaaacgctggtgccatgccaaaagcaagagcgtggatattggatcacggaggtgcgactggtatcacgtcatggggcaaactttggctctcggttttaggagtgtacgagtggagtggcaataatcctctaccacctgaattttggctgtttccttatttcttgccgttccatcccgggcgaatgtggtgtcattgcagaatggtatatttaccaatgagttacctctatggtaagcgttttgtaggtccaattactcctatagttttgtctttacgcaaagaactatacgctgtcccataccatgagatcgattggaacaagtcgcgtaatacatgtgctaaagaagatctttattacccccacccgaaaatgcaggacattctgtgggggtcattgcatcacgtttatgagcccttatttaccagatggccggcgaaaagactaagggaaaaggctttgcaaactgccatgcaacatatacactacgaagatgaaaacacaagatacatttgtttagggcctgtaaataaagtgttgaatttactttgctgttgggtagaagacccatatagcgatgcatttaagctccatttgcagagggttcacgactatttatgggtcgctgaagatggaatgaaaatgcaaggttataatggatctcaattgtgggacacagcatttagcattcaggccattgtctctactaaactcgttgataactacggcccaacgctacggaaggcccatgatttcgtgaaaagcagtcagatacaacaagattgccctggcgatccaaacgtgtggtataggcatatacacaagggtgcttggccattctcaacaagagatcatggttggctgatctccgattgtacagctgagggattaaaggcggcattaatgttgtctaaattaccgagtgaaaccgttggtgagagcttggaaagaaatagactgtgtgatgccgtgaatgtgttgctttccctgcaaaatgacaatggaggtttcgcgtcgtatgaactaactcgatcttatccttggttagaacttatcaaccccgcagaaacctttggggatattgttatcgattatccatacgtggagtgtacttcagcaaccatggaggctttgacactgtttaaaaaacttcatcctggacatcgtactaaggaaattgatacggccatagtacgcgcagctaactttctagaaaatatgcaaagaactgatggtagttggtacggttgctggggcgtttgtttcacttacgctggctggtttggaattaaaggtctagtagctgccggacgtacatataacaattgcttggccattagaaaggcttgtgactttctcttatcaaaagaactacctggtggtgggtggggagagtcttatcttagctgccagaacaaagtatatactaatttggaaggcaacaggccacaccttgttaacacagcatgggtattgatggctctgattgaagctggtcaagctgaacgtgacccaacgcccttacacagagcagcaagactgctgatcaattcacagttagaaaatggtgatttccctcagcaagagatcatgggcgtttttaacaagaattgtatgattacttacgccgcatatcgtaacatatttccgatttgggcattaggggaatactgccatagggtgcttactgaataa

SEQ ID NO: 401 - DNA, 951 bp, Artificial Sequence
  Synthetic
atggatcagatcgagcacattactataaataccaacggcattaaaatgcatatagcgtcagtagggacaggaccagttgtcctgcttctacatggtttccccgaattgtggtactcttggcgtcaccaattgttatatttatcgagtgtgggttatagggcaatcgcccctgacctgagaggttacggcgatacggattccccggcatctccaactagctatacagctctccatattgttggagacttggtgggtgctttagatgaactaggaattgaaaaggtttttctagtcggtcatgactggggcgccataatcgcttggtatttttgccttttccgccctgatcgaattaaagctttggtaaatttatcagttcaatttataccgagaaacccagcaattcctttcatcgaaggttttcgtaccgcgtttggcgacgatttttacatgtgtagattccaggtcccaggagaggcagaggaagattttgcctctatagacactgctcaacttttcaagaccagtctatgtaatagatcctcagcgcccccttgcctcccaaaagaaattgggttcagggccattcccccacctgaaaatttgcctagctggctgacggaggaagatatcaactattacgctgcaaagtttaaacaaacaggtttcactggtgccctcaattactatagagcatttgatcttacttgggaattaacagctccatggactggtgctcaaatacaggttccagtaaaatttatcgtaggagattccgatttgacgtatcattttcccggagcaaaggagtacattcacaacgggggcttcaaaaaagacgtgcctttattggaagaggttgtggtagttaaggatgcatgtcacttcatcaaccaagaaagacctcaagaaattaatgctcatattcatgactttataaataagttctaa

SEQ ID NO: 402 - DNA, 951 bp, Artificial Sequence
  Synthetic
atggagaagattgaacacacaacgatctcgaccaacggtataaatatgcatgtggcatcaattggctctggacccgccgtacttttcttgcatggttttccagaactatggtacagctggaggcaccagttactgtttttaagttccatggggtatagagcgatagctccggacttgcgcggattcggtgatactgatgctccaccttcgcctagttcatataccgcacatcatattgtcggggacttggttggcctattagatcaactcggtatcgatcaagtttttttggtcggacacgactggggtgccatgatggcgtggtacttttgtctgttccgtccagatcgagtgaaagctcttgttaatttatctgttcatttcctaagaagacacccatccattaaatttgtagatgggtttagggcacttttaggagatgacttctatttttgccaatttcaggaacctggcgtggcagaggctgattttggttccgtagacgttgccacaatgttaaagaaattcttgactatgcgggatccaagacccccaatgataccgaaggaaaaaggttttagagctttggaaacacctgatccgctccctgcgtggttaactgaagaagacatcgattacttcgccggtaaatttcgtaagacgggtttcactggaggctttaactattatcgcgctttcaatctgacatgggagctaacagcaccctggtcgggttctgaaataaaggtggcagctaaatttattgtcggagaccttgacttagtttaccattttcctggtgcgaaggagtatattcatggagggggcttcaaaaaagatgtacccttgctagaagaggtcgttgtcgtggatggcgctgcccattttataaatcaagaaagaccagcagagattagctctctaatctacgactttatcaaaaagttctaa

SEQ ID NO: 403 - DNA, 1335 bp, Artificial Sequence
  Synthetic
atgggaaagctattacaattggcattgcatccggtcgagatgaaggcagctttgaagctgaagttttgcagaacaccgctattctccatctatgatcagtccacgtctccatatctcttgcactgtttcgaactgttgaacttgacctccagatcgtttgctgctgtgatcagagagctgcatccagaattgagaaactgtgttactctcttttatttgattttaagggctttggataccatcgaagacgatatgtccatcgaacacgatttgaaaattgacttgttgcgtcacttccacgagaaattgttgttaactaaatggagtttcgacggaaatgcccccgatgtgaaggacagagccgttttgacagatttcgaatcgattcttattgaattccacaaattgaaaccagaatatcaagaagtcatcaaggagatcaccgagaaaatgggtaatggtatggccgactacatcttggatgaaaattacaacttgaatgggttgcaaaccgtccacgactacgacgtgtactgtcactacgtagctggtttggtcggtgatggtttgacccgtttgattgtcattgccaagtttgccaacgaatctttgtattctaatgagcaattgtatgaaagcatgggtcttttcctacaaaaaaccaacatcatcagagactacaatgaagatttggtcgatggtagatccttctggcccaaggaaatctggtcacaatacgctcctcagttgaaggacttcatgaaacctgaaaacgaacaactggggttggactgtataaaccacctcgtcttaaacgcattgagtcatgttatcgatgtgttgacttatttggccagtatccacgagcaatccactttccaattttgtgccattccccaagttatggccattgcaaccttggctttggtattcaacaaccgtgaagtgctacatggcaatgtaaagattcgtaagggtactacctgctatttaattttgaaatcaaggactttgcgtggctgtgtcgagatttttgactattacttacgtgatatcaaatctaaattggctgtgcaagatccaaatttcttaaaattgaacattcaaatctccaagatcgaacaattcatggaagaaatgtaccaggataaattacctcctaacgtgaagccaaatgaaactccaattttcttgaaagttaaagaaagatccagatacgatgatgaattggtcccaacccaacaagaagaagagtacaagttcaatatggttttatctatcatcttgtccgttcttcttgggttttattatatatacactttacacagagcgtga

SEQ ID NO: 404 - DNA, 1491 bp, Artificial Sequence
  Synthetic
atgtctgctgttaacgttgcacctgaattgattaatgccgacaacacaattacctacgatgcgattgtcatcggtgctggtgttatcggtccatgtgttgctactggtctagcaagaaagggtaagaaagttcttatcgtagaacgtgactgggctatgcctgatagaattgttggtgaattgatgcaaccaggtggtgttagagcattgagaagtctgggtatgattcaatctatcaacaacatcgaagcatatcctgttaccggttataccgtctttttcaacggcgaacaagttgatattccatacccttacaaggccgatatccctaaagttgaaaaattgaaggacttggtcaaagatggtaatgacaaggtcttggaagacagcactattcacatcaaggattacgaagatgatgaaagagaaaggggtgttgcttttgttcatggtagattcttgaacaacttgagaaacattactgctcaagagccaaatgttactagagtgcaaggtaactgtattgagatattgaaggatgaaaagaatgaggttgttggtgccaaggttgacattgatggccgtggcaaggtggaattcaaagcccacttgacatttatctgtgacggtatcttttcacgtttcagaaaggaattgcacccagaccatgttccaactgtcggttcttcgtttgtcggtatgtctttgttcaatgctaagaatcctgctcctatgcacggtcacgttattcttggtagtgatcatatgccaatcttggtttaccaaatcagtccagaagaaacaagaatcctttgtgcttacaactctccaaaggtcccagctgatatcaagagttggatgattaaggatgtccaacctttcattccaaagagtctacgtccttcatttgatgaagccgtcagccaaggtaaatttagagctatgccaaactcctacttgccagctagacaaaacgacgtcactggtatgtgtgttatcggtgacgctctaaatatgagacatccattgactggtggtggtatgactgtcggtttgcatgatgttgtcttgttgattaagaaaataggtgacctagacttcagcgaccgtgaaaaggttttggatgaattactagactaccatttcgaaagaaagagttacgattccgttattaacgttttgtcagtggctttgtattctttgttcgctgctgacagcgataacttgaaggcattacaaaaaggttgtttcaaatatttccaaagaggtggcgattgtgtcaacaaacccgttgaatttctgtctggtgtcttgccaaagcctttgcaattgaccagggttttcttcgctgtcgctttttacaccatttacttgaacatggaagaacgtggtttcttgggattaccaatggctttattggaaggtattatgattttgatcacagctattagagtattcaccccatttttgtttggtgagttgattggttaa

SEQ ID NO: 405 - DNA, 2196 bp, Artificial Sequence
  Synthetic
atgacagaattttattctgacacaatcggtctaccaaagacagatccacgtctttggagactgagaactgatgagctaggccgagaaagctgggaatatttaacccctcagcaagccgcaaacgacccaccatctacctttacacaatggctactgcaagatcccaaatttcctcaacctcatccagaaagaaataagcattcaccagatttttcagccttcgatgcgtgtcataatggtgcatcttttttcaaactgcttcaagagcctgactcaggtatttttccgtgtcaatataaaggacccatgttcatgacaatcggttacgtagccgtaaactatatcgccggtattgaaattcctgagcatgagagaatagaattaattagatacatcgtcaatactgctcaccctgtcgacggaggttggggtctacattctgttgacaaatccaccgtgtttggtacagtattgaactatgtaatcttacgtttattgggtctacccaaggaccacccggtttgcgccaaggcaagaagcacattgttaaggttaggcggtgctattggatcccctcactggggaaaaatttggctaagtgcactaaacttgtataaatgggaaggtgtgaaccctgcccctcctgaaacttggttacttccatattcactgcccatgcatccggggagatggtgggttcatactagaggtgtttacattccggtcagttacctgtcattggtcaaattttcttgcccaatgactcctcttcttgaagaactgaggaatgaaatttacactaaaccgtttgacaagattaacttctccaagaacaggaataccgtatgtggagtagacctatattacccccattctactactttgaatattgcgaacagccttgtagtattttacgaaaaatacctaagaaaccggttcatttactctctatccaagaagaaggtttatgatctaatcaaaacggagttacagaatactgattccttgtgtatagcacctgttaaccaggcgttttgcgcacttgtcactcttattgaagaaggggtagactcggaagcgttccagcgtctccaatataggttcaaggatgcattgttccatggtccacagggtatgaccattatgggaacaaatggtgtgcaaacctgggattgtgcgtttgccattcaatactttttcgtcgcaggcctcgcagaaagacctgaattctataacacaattgtctctgcctataaattcttgtgtcatgctcaatttgacaccgagtgcgttccaggtagttatagggataagagaaagggggcttggggcttctcaacaaaaacacagggctatacagtggcagattgcactgcagaagcaattaaagccatcatcatggtgaaaaactctcccgtctttagtgaagtacaccatatgattagcagtgaacgtttatttgaaggcattgatgtgttattgaacctacaaaacatcggatcttttgaatatggttcctttgcaacctatgaaaaaatcaaggccccactagcaatggaaaccttgaatcctgctgaagtttttggtaacataatggtagaatacccatacgtggaatgtactgattcatccgttctggggttgacatattttcacaagtacttcgactataggaaagaggaaatacgtacacgcatcagaatcgccatcgaattcataaaaaaatctcaattaccagatggaagttggtatggaagctggggtatttgttttacatatgccggtatgtttgcattggaggcattacacaccgtgggggagacctatgagaattcctcaacggtaagaaaaggttgcgacttcttggtcagtaaacagatgaaggatggcggttggggggaatcaatgaagtccagtgaattacatagttatgtggatagtgaaaaatcgctagtcgttcaaaccgcatgggcgctaattgcacttcttttcgctgaatatcctaataaagaagtcatcgaccgcggtattgaccttttaaaaaatagacaagaagaatccggggaatggaaatttgaaagtgtagaaggtgttttcaaccactcttgtgcaattgaatacccaagttatcgattcttattccctattaaggcattaggtatgtacagcagggcatatgaaacacatacgctttaa

SEQ ID NO: 406 - protein, 520 aa, Siraitia grosvenorii; identical to SEQ ID NO: 129

SEQ ID NO: 407 - protein, 692 aa, Arabidopsis thaliana [sequence omitted]

SEQ ID NO: 408 - protein, 701 aa, Siraitia grosvenorii; identical to SEQ ID NO: 131

SEQ ID NO: 409 - protein, 759 aa, Siraitia grosvenorii; identical to SEQ ID NO: 64

SEQ ID NO: 410 - protein, 316 aa, Siraitia grosvenorii; identical to SEQ ID NO: 135

SEQ ID NO: 411 - protein, 316 aa, Arabidopsis thaliana; identical to SEQ ID NO: 136

SEQ ID NO: 412 - protein, 444 aa, Saccharomyces cerevisiae
MGKLLQLALHPVEMKAALKLKFCRTPLFSIYDQSTSPYLLHCFELLNLTSRSFAAVIRELHPELRNCVTLFYLILRALDTIEDDMSIEHDLKIDLLRHFHEKLLLTKWSFDGNAPDVKDRAVLTDFESILIEFHKLKPEYQEVIKEITEKMGNGMADYILDENYNLNGLQTVHDYDVYCHYVAGLVGDGLTRLIVIAKFANESLYSNEQLYESMGLFLQKTNIIRDYNEDLVDGRSFWPKEIWSQYAPQLKDFMKPENEQLGLDCINHLVLNALSHVIDVLTYLASIHEQSTFQFCAIPQVMAIATLALVFNNREVLHGNVKIRKGTTCYLILKSRTLRGCVEIFDYYLRDIKSKLAVQDPNFLKLNIQISKIEQFMEEMYQDKLPPNVKPNETPIFLKVKERSRYDDELVPTQQEEEYKFNMVLSIILSVLLGFYYIYTLHRA

SEQ ID NO: 413 - protein, 496 aa, Saccharomyces cerevisiae
MSAVNVAPELINADNTITYDAIVIGAGVIGPCVATGLARKGKKVLIVERDWAMPDRIVGELMQPGGVRALRSLGMIQSINNIEAYPVTGYTVFFNGEQVDIPYPYKADIPKVEKLKDLVKDGNDKVLEDSTIHIKDYEDDERERGVAFVHGRFLNNLRNITAQEPNVTRVQGNCIEILKDEKNEVVGAKVDIDGRGKVEFKAHLTFICDGIFSRFRKELHPDHVPTVGSSFVGMSLFNAKNPAPMHGHVILGSDHMPILVYQISPEETRILCAYNSPKVPADIKSWMIKDVQPFIPKSLRPSFDEAVSQGKFRAMPNSYLPARQNDVTGMCVIGDALNMRHPLTGGGMTVGLHDVVLLIKKIGDLDFSDREKVLDELLDYHFERKSYDSVINVLSVALYSLFAADSDNLKALQKGCFKYFQRGGDCVNKPVEFLSGVLPKPLQLTRVFFAVAFYTIYLNMEERGFLGLPMALLEGIMILITAIRVFTPFLFGELIG

SEQ ID NO: 414 - protein, 731 aa, Saccharomyces cerevisiae
MTEFYSDTIGLPKTDPRLWRLRTDELGRESWEYLTPQQAANDPPSTFTQWLLQDPKFPQPHPERNKHSPDFSAFDACHNGASFFKLLQEPDSGIFPCQYKGPMFMTIGYVAVNYIAGIEIPEHERIELIRYIVNTAHPVDGGWGLHSVDKSTVFGTVLNYVILRLLGLPKDHPVCAKARSTLLRLGGAIGSPHWGKIWLSALNLYKWEGVNPAPPETWLLPYSLPMHPGRWWVHTRGVYIPVSYLSLVKFSCPMTPLLEELRNEIYTKPFDKINFSKNRNTVCGVDLYYPHSTTLNIANSLVVFYEKYLRNRFIYSLSKKKVYDLIKTELQNTDSLCIAPVNQAFCALVTLIEEGVDSEAFQRLQYRFKDALFHGPQGMTIMGTNGVQTWDCAFAIQYFFVAGLAERPEFYNTIVSAYKFLCHAQFDTECVPGSYRDKRKGAWGFSTKTQGYTVADCTAEAIKAIIMVKNSPVFSEVHHMISSERLFEGIDVLLNLQNIGSFEYGSFATYEKIKAPLAMETLNPAEVFGNIMVEYPYVECTDSSVLGLTYFHKYFDYRKEEIRTRIRIAIEFIKKSQLPDGSWYGSWGICFTYAGMFALEALHTVGETYENSSTVRKGCDFLVSKQMKDGGWGESMKSSELHSYVDSEKSLVVQTAWALIALLFAEYPNKEVIDRGIDLLKNRQEESGEWKFESVEGVFNHSCAIEYPSYRFLFPIKALGMYSRAYETHTL

SEQ ID NO: 415 - DNA, 24 bp, Artificial Sequence
  Synthetic
gatgcacgagcgcaacgctcacaa
